(19) United States
(12) Patent Application Publication
(10) Pub. No.: US 2004/0191818 A1
(43) Pub. Date: Sep. 30, 2004

(54) Compositions and methods for diagnosing and treating autoimmune diseases

(76) Inventors: Margot Mary O'Toole, Newton, MA (US); Wei Liu, Sudbury, MA (US)

Correspondence Address: NIXON PEABODY, LLP, 401 9TH STREET, NW, SUITE 900, WASHINGTON, DC, 20004-2128, US

(21) Appl. No.: 10/786,720

(22) Filed: Feb. 26, 2004

Related U.S. Application Data
(60) Provisional application No. 60/449,753, filed on Feb. 26, 2003.
(60) Provisional application No. 60/449,693, filed on Feb. 26, 2003.
(60) Provisional application No. 60/449,795, filed on Feb. 26, 2003.

(51) Int. Cl. C12Q 1/68; A61K 38/17

(52) U.S. Cl. 435/6; 514/12

(57) ABSTRACT

Compositions and methods for diagnosing, preventing, or treating lupus nephritis (LN), systemic lupus erythematosus (SLE), or other autoimmune diseases. Lupus-related genes (LRGs) are identified in the present invention. These genes are differentially expressed in lupus-affected or lupus-predisposed tissues as compared to disease-free tissues. The genes and their expression products can be used as markers for diagnosing or monitoring SLE or LN. Modulators of the expression or protein activities of these genes can be used for the prevention or treatment of SLE/LN or other autoimmune diseases.

[0001] This application claims the benefit of U.S. Provisional Application Serial No. 60/449,693, filed Feb. 26, 2003 and entitled “Compositions and Methods for Diagnosing and Treating Autoimmune Disease,” U.S. Provisional Application Serial No. 60/449,753, filed Feb. 26, 2003 and entitled “Compositions and Methods for Diagnosing and Treating Autoimmune Disease,” and U.S. Provisional Application Serial No. 60/449,795, filed Feb. 26, 2003 and entitled “Compositions and Methods for Diagnosing and Treating Autoimmune Disease.”

[0002] This application incorporates by reference all materials recorded in compact discs labeled “Copy 1” and “Copy 2.” Each of the compact discs includes the file entitled “AM101331L Sequence Listing.ST25.txt” (3,406 KB, created on Feb. 26, 2004).

### TECHNICAL FIELD

[0003] The present invention relates to compositions and methods useful for the diagnosis, prevention, or treatment of lupus nephritis (LN), systemic lupus erythematosus (SLE), or other autoimmune diseases.

### BACKGROUND

[0004] Lupus nephritis (LN) is an inflammation of the kidney caused by systemic lupus erythematosus (SLE). SLE, commonly known as lupus, is an autoimmune rheumatic disease characterized by the deposition in tissues of autoantibodies and immune complexes leading to tissue injury. In contrast to autoimmune diseases such as multiple sclerosis and type 1 diabetes mellitus, SLE potentially involves multiple organ systems directly, and its clinical manifestations are diverse and variable. For example, some patients may demonstrate primarily skin rash and joint pain, show spontaneous remissions, and require little medication. At the other end of the spectrum are patients who demonstrate severe and progressive kidney involvement that requires immediate medical attention.

[0005] The serological hallmark of SLE, and the primary diagnostic test available until now, is elevated serum levels of IgG antibodies to constituents of the cell nucleus, such as double-stranded DNA (dsDNA), single-stranded DNA, and chromatin. Among these autoantibodies, IgG anti-dsDNA antibodies play a major role in the development of LN. LN is a serious condition in which the capillary walls of the kidney's blood purifying glomeruli are injured by the deposition of DNA/anti-DNA antibody complexes and the resulting complement activation and local inflammation. The disease is often chronic and progressive and may lead to eventual renal failure.

[0006] SLE is predominantly a female disease with an approximate female to male ratio of 9:1. In North America, it is estimated to affect 1 in 500 females between the ages of 20 to 40 years. It has been estimated that 45-75% of SLE patients eventually suffer kidney damage.

[0007] SLE shows a strong familial aggregation. While genetically-determined immune abnormalities are implicated in the cause of SLE, the triggering event is suggested to include both exogenous and endogenous factors, likely mutagenic in origin. Certain environmental and pharmacological agents, including UV light and drugs, such as procainamide and hydralazine, have been shown to trigger a lupus-like illness in genetically predisposed individuals.

[0008] Genetic studies of murine SLE have identified susceptibility loci in several inbred strains which spontaneously develop LN (for review, see Theofilopoulus, Immunol. Today, 15:150-58, 1995). These studies have included genome-wide searches for evidence of linkage using backcrosses or F₂ intercrosses of lupus mice such as MRL/LPR, NZB/NZW and NZM/Aeg2410 mice. Recent success in mapping a susceptibility locus for multiple sclerosis in the 5p14-p12 region, which is syngeneic to the murine locus Ea2, further supports the utility of this mouse-to-human approach. A genetic marker test for lupus has been generally described by Tsao et al. in U.S. Pat. No. 6,280,941.

[0009] MRL/MpJ-Fas^{lPr} mouse is a model for systemic lupus erythematosus-like autoimmune syndromes. The MRL/MpJ-Fas^{lPr} mice are generated by introducing a lymphoproliferation spontaneous mutation (Fas^{lPr}) within the fas gene into the MRL/MpJ mice. The fas protein is a cell surface antigen of about 35 kd that mediates apoptosis. It has a single transmembrane domain between its extracellular and cytoplasmic domains. The fas protein, a member of the tumor necrosis factor receptor superfamily, shows structural homology with several cell surface antigens, including the tumor necrosis factor and the low-affinity nerve growth factor receptor. The ligand for the fas protein, encoded by Fasl, is a member of the tumor necrosis factor family. Fas and its ligand are involved in down-regulating immune reactions.

[0010] MRL/MpJ-Fas^{lPr} mice show systemic autoimmunity, massive lymphadenopathy associated with proliferation of aberrant T cells, arthritis, and LN. Onset and severity of symptoms are dependent on genetic background, with the original MRL/MpJ background being most severely affected beginning about 8 weeks of age. The female and male mice die at an average age of 17 weeks and 22 weeks, respectively. It has been demonstrated that the Fas^{lPr} mutation is required for the development of LN and the subsequent death at an early age.

[0011] MRL/MpJ mice, the ancestral strain of MRL/MpJ-Fas^{lPr}, also exhibit autoimmune disorders but the symptoms are manifested much later in life compared to those of the MRL/MpJ-Fas^{lPr} mice. Starting at about three months of age, levels of circulating immune complexes rise greatly in the MRL/MpJ-Fas^{lPr} mouse but not in the wild-type control, MRL/MpJ. Also, beginning at 3 months MRL/MpJ-Fas^{lPr} mice exhibit very severe proliferative glomerulonephritis, whereas in the MRL/MpJ controls only mild glomerular lesions are usually detected. The MRL/MpJ wild-type females die at 73 weeks of age and males at 93 weeks, as in contrast to a lifespan of 17 weeks for females and 22 weeks for males in the MRL/MpJ mice homozygous for Fas^{lpr}. However, when the Fas^{lPr} mutation is bred into other strains (C57BL/6 for example), kidney function remains normal through life. It thus appears that the MRL/MpJ mice have inherited a predisposition to developing lupus which is accelerated in the presence of the Fas^{lPr} allele

[0012] Treatment for SLE is directed at controlling the symptoms with the hope of putting the disease into remission. There are several chemotherapeutic agents in commercial use and available for remedial purposes. Most of these agents are not without side effects, some of which are severe and debilitating to the patient. Some non-steroidal anti-inflammatory agents may cause stomach upset and changes in kidney function, which can mimic some lupus symptoms themselves. Some anti-malarial drugs, when required at high dosage levels over a prolonged time frame, may accumulate in the retina and cause loss of vision. Certain steroidal preparations are used for their anti-inflammatory activity. The steroids, however, can exhibit side effects such as pronounced swelling of the face and abdomen, weight gain, excessive growth of body hair, cataracts, osteoporosis and heart attacks. Use of immunosuppressants can also have serious side effects such as changes in bone marrow, increased risk of infection to which the body normally shows resistance and a slight increase in the risk of developing certain types of cancer.

[0013] Another method of treatment for SLE is to generate monoclonal antibodies against anti-DNA antibodies (i.e., anti-idiotypic antibodies) and then use these anti-idiotypic antibodies to remove the pathogenic anti-DNA antibodies from the patient's system (see U.S. Pat. No. 4,690,905, Diamond et al.). This approach, however, requires the removal of large quantities of blood for treatment in a process similar to hemodialysis. It is expensive and time-consuming, and is also associated with the risk of infection and/or hemorrhaging. Therefore, there remains a need for improved methods for diagnosing and treating SLE, as well as SLE-related diseases, such as LN.

### SUMMARY OF THE INVENTION

[0014] The present invention provides compositions and methods that are useful for the diagnosis, prevention, or treatment of LN, SLE, or other autoimmune diseases. Numerous lupus-related genes (LRGs) can be identified according to the present invention. These genes are differentially expressed in pre-symptomatic lupus-affected or -predisposed tissues as compared to disease-free tissues. In many embodiments, the LRGs of the present invention are also differentially expressed in early-stage lupus-affected tissues as compared to disease-free tissues. In many other embodiments, the different expression profiles of the LRGs in lupus-affected or lupus-predisposed tissues are not affected by age, gender, or Fas^{lPr} background. The LRGs of the present invention can be used as markers for diagnosing or monitoring SLE or LN. The LRGs can also be used as drug targets for the prevention or treatment of SLE, LN, or other autoimmune diseases.

[0015] In one aspect, the present invention provides methods useful for diagnosing or monitoring SLE or LN in a subject of interest. The methods include the steps of detecting an expression profile of at least one LRG gene in a biological sample of the subject, and comparing the expression profile to a reference expression profile of the LRG gene. In one embodiment, the LRG gene is over-expressed in both pre-symptomatic and early disease tissues as compared to disease-free tissues. In another embodiment, the LRG gene is under-expressed in both pre-symptomatic and early disease tissues.

[0016] The biological samples amenable to the present invention include, but are not limited to, urine samples, kidney samples, or other bodily fluid or tissue samples. In one embodiment, the biological samples are blood samples. Without limiting the present invention to any particular theory, the biological mechanism(s) involved in the up-regulation or down-regulation of LRGs in kidney tissues may also modulate the expression of the same genes in blood samples.

[0017] The expression profile of an LRG in a biological sample can be determined by using any method known in the art. Examples of these methods include, but are not limited to, RT-PCT, Northern Blot, in situ hybridization, slot-blotting, nuclease protection assay, nucleic acid arrays, or immunoassays. A variety of immunoassay formats are available for the present invention. They include, without limitation, latex or other particle agglutination, electrochemiluminescence, ELISAs, RIAs, sandwich or immunometric assays, time-resolved fluorescence, lateral flow assays, fluorescence polarization, flow cytometry, immunohistochemical assays, Western blots, and proteomic chips.

[0018] In many embodiments, the reference expression profile of an LRG and the expression profile being compared are determined using the same or comparable assays. In one example, the reference expression profile is an average expression profile of the LRG in disease-free tissues. In another embodiment, the reference expression profile is an average expression of the LRG in lupus-affected or lupus-predisposed tissues. The comparison between the expression profiles can be quantitative or qualitative. The comparison can be conducted based on absolute difference, expression ratio, or other measures that can represent a difference in expression profiles. In one example, pattern reorganization programs are used to compare expression profiles.

[0019] In one embodiment, the LRGs used in the present invention are selected from Table 1. In another embodiment, the LRGs are selected from Table 5b.

[0020] In another aspect, the present invention provides pharmaceutical compositions which include a pharmaceutically-acceptable carrier and at least one active component selected from the group consisting of (1) a polypeptide encoded by an LRG gene; (2) a variant of the polypeptide; and (3) a polynucleotide encoding the polypeptide or variant. In one embodiment, the LRG gene is over-expressed in lupus-affected or lupus-predisposed tissues as compared to disease-free tissues, and the pharmaceutical compositions are vaccine formulations capable of eliciting an immune response against lupus-affected or lupus-predisposed cells or components thereof. In one example, the lupus-affected or lupus-predisposed cells are human cells or tissues. In another example, the LRG gene is selected from Table 1. Any method known in the art may be used to administer the pharmaceutical compositions of the present invention into a subject to achieve the desirable therapeutic or prophylactic effect.

[0021] In yet another aspect, the present invention provides pharmaceutical compositions which include a pharmaceutically-acceptable carrier and at least one active component selected from the group consisting of (1) an agent capable of modulating the expression of an LRG gene; (2) an agent capable of binding to, or modulating a biological activity of, a polypeptide encoded by the LRG gene; and (3) a T cell activated by the polypeptide. The LRG gene can be either over-expressed or under-expressed in lupus-affected or lupus-predisposed tissues as compared to disease-free tissues. By administering the pharmaceutical compositions of the present invention or by contacting the compositions with lupus-affected or lupus-predisposed cells or tissues, the abnormality in the expression or activity of an LRG may be corrected or reduced, thereby ameliorating the syndrome or progression of SLE/LN.

[0022] In one embodiment, the LRGs are over-expressed in lupus-affected or lupus-predisposed tissues. The pharmaceutical compositions of the present invention include a polynucleotide which can inhibit the expression of the LRGs by RNAi or an anti-sense mechanism. In another embodiment, the pharmaceutical compositions of the present invention include antibodies or other molecules capable of binding to and inhibiting the biological activities of the LRG proteins.

[0023] In still another embodiment, the LRGs are under-expressed in lupus-affected or lupus-predisposed tissues. The pharmaceutical compositions of the present invention include agents that can stimulate the expression or protein activities of the LRGs. In a further embodiment, the pharmaceutical compositions of the present invention include gene therapy vectors which encode the LRGs or fragments thereof. Introducing the gene therapy vectors into a subject in need thereof may restore the expression or protein activies of the LRGs in lupus-affected or lupus-predisposed tissues.

[0024] The present invention also features diagnostic kits or assay systems that include probes for LRGs or their expression products. In one embodiment, the kits or systems include polynucleotide probes capable of hybridizing under stringent or highly stringent conditions to LRG transcripts, or the complements thereof. Examples of LRG transcripts include, but are not limited to, SEQ ID NOS: 1-29. In another embodiment, the kits or systems include antibodies or other polypeptide probes that can bind to LRG proteins. Examples of LRG proteins include, but are not limited to, SEQ ID NOS: 30-57.

[0025] In a further aspect, the present invention provides methods useful for identifying agents that are capable of modulating the expression or protein activities of LRG genes. The methods include the steps of contacting a candidate agent with lupus-affected or lupus-predisposed cells, and comparing expression profiles or protein activities of LRG genes in the cells before and after said contacting to determine if the agent can modulate the expression or protein activities of the LRG genes. The cells employed in these methods can be, without limitation, cell cultures or tissues cultures. In one example, the agent is administered into a subject (e.g., an animal model) to determine if the agent can modulate the expression profiles of LRGs in lupus-affected or lupus-predisposed cells in vivo.

[0026] In another aspect, the present invention provides methods useful for evaluating the effectiveness or efficacy of an agent in preventing or treating LN, SLE, or other autoimmune diseases. The methods include the steps of administering an agent to a lupus-affected or lupus-predisposed subject, and comparing expression profiles or protein activities of LRGs in biological samples of the subject before and after the administration to determine if the agent modulates the expression or protein activities of the LRG genes. Elimination or reduction of the abnormality in the expression or protein activities of the LRG genes is indicative of the effectiveness or efficacy of the agent.

[0027] Furthermore, the present invention provides host cells harboring transfected LRGs. These cells can be used for the treatment of SLE/LN. The present invention also provides knock-out animals in which the genomic sequence of at least one LRG is disrupted.

[0028] Other objects, features and advantages of the present invention will become apparent from the following detailed description. The detailed description and specific examples, while indicating preferred embodiments, are given for illustration only since various changes and modifications within the scope of the invention will become apparent to those skilled in the art from this detailed description. Further, the examples demonstrate the principle of the invention and should not be expected to specifically illustrate the application of this invention to all the examples of infections where it obviously will be useful to those skilled in the prior art.

### BRIEF DESCRIPTION OF THE DRAWINGS

[0029] The inventions of this application are better understood in conjunction with the following drawing. The drawing is provided for illustration, not limitation.

[0030] FIG. 1 is a flow chart describing steps for selecting lupus-related genes according to the present invention.

### DETAILED DESCRIPTION OF THE INVENTION

[0031] The present invention is directed to compositions and methods useful for the diagnosis, prevention, or treatment of SLE/LN or other autoimmune diseases, and to the identification of novel therapeutic agents for SLE/LN or other autoimmune diseases. The present invention is based on the discovery of lupus-related genes (LRGs) that are differentially expressed (e.g., over-expressed or under-expressed) in animals that are affected by or predisposed to SLE/LN as compared to SLE/LN-free animals. In many embodiments, the ratio of the average expression level of an LRG in SLE/LN-affected or SLE/LN-predisposed tissues over that in SLE/LN-free tissues is at least 1.5:1, 2:1, 3:1, 4:1, 5:1, or greater. In many other embodiments, the LRGs of the present invention are over-expressed in both pre-symptomatic and early-stage lupus-affected tissues. In still many other embodiments, the p-value of Student's t-test for the different expression profiles of an LRG in SLE/LN-affected or -predisposed tissues versus SLE/LN-free tissues is no greater than 0.01, 0.005, 0.0001, or lesser. LRGs down-regulated in SLE/LN-affected or SLE/LN-predisposed tissues are identified.

[0032] Various aspects of the invention are described in further detail in the following subsections. The use of subsections is not meant to limit the invention; subsections may apply to any aspect of the invention. In this application, the use of “or” means “and/or” unless stated otherwise.

[0033] LRGs and LN

[0034] In one embodiment, LRGs were identified by gene expression analysis using kidney RNA samples harvested from 4 different strains of mice, namely: MRL/MpJ-Fas^{lPr}, MRL/MpJ, C57BL6 and C57BL6/Fas^{lPr}. A gene analysis set of 5285 oligonucleotides was first selected using the criteria described in Examples. The expression frequency of each gene on these 5285 oligonucleotides in the gene analysis set was then determined for all C57BL6, C57BL6/Fas^{lPr}, MRL/MpJ-Fas^{lPr} and MRL/MpJ kidney samples (n=46).

[0035] Table 1 lists examples of the human orthologs of mouse LRG genes identified by the present invention. These genes include, but are not limited to, FSHD region gene1 (FRG1); glutamyl-prolyl-tRNA synthetase (EPRS); profilin 1 (PFN1); proteasome 26S subunit, non-ATPase, 8 (PSMD 8); axin 1 (AXIN1); guanine nucleotide binding protein, beta polypeptide 1 (GNB 1); collagen, type IV, alpha 3 (COL4A3); heat shock 10 kd protein 1 (chaperonin 10, HSPE1); dodecenoyl-Coenzyme A delta isomerase (DCI); recoverin (RCV1); secreted frizzled-related protein 1 (SFRPI); CD82 antigen (KAI1); and apolipoprotein M (APOM).

TABLE 1
Examples of Lupus-Related Genes (LRGs)

| | | cDNA Sequence | |
|---|---|---|---|
| | | (including isoforms or | Amino Acid |
| Gene Symbol | LocusID | alternative splicing) | Sequence |
| FRG1 | 2483 | SEQ ID NO: 1 | SEQ ID NO: 30 |
| EPRS | 2058 | SEQ ID NO: 2 | SEQ ID NO: 31 |
| PFN1 | 5216 | SEQ ID NO: 3 | SEQ ID NO: 32 |
| PSMD8 | 5714 | SEQ ID NO: 4 | SEQ ID NO: 33 |
| | | SEQ ID NO: 5 | |
| AXIN1 | 8312 | SEQ ID NO: 6 | SEQ ID NO: 34 |
| | | SEQ ID NO: 7 | SEQ ID NO: 35 |
| | | SEQ ID NO: 8 | SEQ ID NO: 36 |
| GNB1 | 2782 | SEQ ID NO: 9 | SEQ ID NO: 37 |
| COL4A3 | 1285 | SEQ ID NO: 10 | SEQ ID NO: 38 |
| | | SEQ ID NO: 11 | SEQ ID NO: 39 |
| HSPE1 | 3336 | SEQ ID NO: 12 | SEQ ID NO: 40 |
| DCI | 1632 | SEQ ID NO: 13 | SEQ ID NO: 41 |
| RCV1 | 5957 | SEQ ID NO: 14 | SEQ ID NO: 42 |
| SFRP1 | 6422 | SEQ ID NO: 15 | SEQ ID NO: 43 |
| APOM | 55937 | SEQ ID NO: 16 | SEQ ID NO: 44 |
| KAI1 | 3732 | SEQ ID NO: 17 | SEQ ID NO: 45 |
| FLJ22709 | 79629 | SEQ ID NO: 18 | SEQ ID NO: 46 |
| KIAA0063 | 9929 | SEQ ID NO: 19 | SEQ ID NO: 47 |
| LOC57019 | 57019 | SEQ ID NO: 20 | SEQ ID NO: 48 |
| TIM14 (homolog | 131118 | SEQ ID NO: 21 | SEQ ID NO: 49 |
| of yeast | | SEQ ID NO: 22 | SEQ ID NO: 50 |
| TIM14) | | SEQ ID NO: 23 | SEQ ID NO: 51 |
| | | SEQ ID NO: 24 | SEQ ID NO: 52 |
| GABRB3 | 2562 | SEQ ID NO: 25 | SEQ ID NO: 53 |
| | | SEQ ID NO: 26 | SEQ ID NO: 54 |
| FLJ30990 | 150737 | SEQ ID NO: 27 | SEQ ID NO: 55 |
| FLJ38991 | 285521 | SEQ ID NO: 28 | SEQ ID NO: 56 |
| CLN6 | 54982 | SEQ ID NO: 29 | SEQ ID NO: 57 |

### The Biochemical and Biological Characteristics of the LRGs

[0036] 1. FRG1 (FSHD Region Gene 1)

[0037] FRG1 (FSHD region gene 1) was identified as a gene related to facioscapulohumeral muscular dystrophy (FSHD), an autosomal dominant neuromuscular disorder. The disease is characterized by the weakness of the muscles of the face, upper-arm and shoulder girdle. The FRG1 gene has been mapped to chromosome locus 4q35 and is closely linked to D4F1O4S1. This evolutionarily conserved gene belongs to a multi-gene family with FRG1 related sequences on multiple chromosomes. The mature chromosome 4 FRG1 transcript is 1042 bp in length and contains nine exons which encode a putative protein of 258 amino acid residues. The biological function of the FRG1 protein and its role in the pathophysiology of FSHD still remain to be elucidated.

[0038] 2. Glutamyl-prolyl-tRNA Synthetase (EPRS)

[0039] AminoacyltRNA synthetases are a class of enzymes that charge tRNAs with their cognate amino acids. In humans, the glutamyl-tRNA synthetase (GluRS) and prolyl-tRNA synthetase (ProRS) activities are contained within a single polypeptide chain, even though these enzymes belong to different classes and are thought to have evolved along independent evolutionary pathways. Glutamyl-prolyl-tRNA synthetase is made up of 1,440 amino acids encoded by 29 exonx. The exons encoding the glutamyl-specific and prolyl-specific parts of the enzyme are clustered at opposite ends of the gene, separated by a long intervening DNA section with a number of exons which encode functions that may be involved in the organization of the mammalian multienzyme synthetase complex.

[0040] 3. Profilin 1 (PFNJ)

[0041] The protein encoded by this gene is a ubiquitous action monomer-binding protein belonging to the profilin family. It is thought to regulate actin polymerization in response to extracellular signals. Deletion of this gene is associated with Miller-Dieker syndrome, a developmental defect of the brain caused by incomplete neuronal migration Profilm 2, another member of the profilin family, has been identified as a endotbelial cell auto antigens in SLE (Frampton et al Rheumatology, 39:1114-1120, 2000).

[0042] 4. Proteasome 26S Subunit, non-A TPase 8 (PSMD8)

[0043] PSMD8 is one of the subunits in 26S proteasome, a protein complex involved in the degradation of cellular proteins through the ubiquitin/proteasome pathway. Generally, the ubiquitin/proteasome pathway involves two successive steps: 1) conjugation of multiple ubiquitin moieties to the substrate and 2) degradation of the tagged protein by the downstream 26S proteasome complex. Proteasome is a dynamic protein complex forming multiple interactions with transiently associated subunits and cellular factors that are necessary for functions such as cellular localization, presentation of substrates, substrate-specific interactions, or generation of various products.

[0044] 5. Axin 1 (AXIN1)

[0045] Axin 1 is a component of the Wnt signaling pathway and negatively regulates this pathway. The Wnt signaling pathway is conserved in various species from worms to mammals, and plays important roles in development, cellular proliferation, and differentiation. Wnt stabilizes cytoplasmic beta-catenin, which stimulates the expression of genes including c-myc, c-jun, fra-1, and cyclin D1. Other components of the Wnt signaling pathway, including Dv1, glycogen synthase kinase-3beta, beta-catenin, and adenomatous polyposis coli, interact with Axin, and the phosphorylation and stability of beta-catenin are regulated in the Axin complex. Thus, Axin acts as a scaffold protein in the Wnt signaling pathway, thereby regulating cellular functions. Human Axin is strongly similar to murine Axin and may also regulate embryonic axis formation.

[0046] 6. Guanine Nucleo Tide Binding Protein, Beta Polypeptide 1 (GNB1)

[0047] Heterotrimeric guanine nucleotide-binding proteins (G proteins), which integrate signals between receptors and effector proteins, are composed of an alpha, a beta, and a gamma subunit. These subunits are encoded by families of related genes. The GNB1 gene encodes a beta subunit. Beta subunits are important regulators of alpha subunits, as well as of certain signal transduction receptors and effectors. This gene uses alternative polyadenylation signals.

[0048] 7. Collagen, Type IV, Alpha 3 (COL4A3)

[0049] This gene encodes one of the six subunits of type IV collagen, the major structural component of basernent membranes. It plays a role in Goodpasture syndrome, a rare autoimmune disease that leads to autoimmune attack to lungs and kidneys. In the Goodpasture syndrome, autoantibodies bind to the collagen molecules in the basement membranes of alveoli and glomeruli. The epitopes that elicit these autoantibodies are localized largely to the non-collagenous C-terminal domain of the protein A specific kinase phosphorylates ammo acids in this same C-terminal region and the expression of this kinase is up-regulated during pathogenesis. There are six alternate transcripts that appear to be unique to this human subunit gene and alternate splicing is restricted to the six exons that encode this domain.

[0050] COL4A3 gene is also linked to an autosomal recessive form of Alport syndrome. Alport syndrome, affecting about one in 5,000 persons, is hereditary glomerulonephritis that is caused by mutation of one or the other of several COL4A genes that specify alpha chains of basement membrane (Type IV) collagen, or by mutation of unknown genes. Especially in males, the resultant chronic nephritis progresses via uremic syndrome to end-stage renal disease treatable only by dialysis or by kidney transplantation. In various families, nephritis may be associated with various combinations of hearing loss, lenticonus and other eye disorders, immunologic abnormality of skin, disorders of platelets, abnormalities of white blood cells, or smooth muscle tumors.

[0051] 8. Heat Shock 10 kd Protein 1 (Chaperonin 10, HSFEJ)

[0052] Chaperonins are a subclass of molecular chaperones that assist both the folding of newly synthesized proteins and the maintenance of proteins in a folded state during periods of stress.

[0053] Chaperonin 10 interacts with chaperonin 60 (HSPD1) to retold denatured proteins. Human HSPE1 shares very high homology to murine Hspe1.

[0054] 9. Dodecenoyl-Coenzyme A Delta Isomerase (DCI)

[0055] Cellular energy metabolism is largely sustained by mitochondrial beta-oxidation of saturated and unsaturated fatty acids. DCI is the link in mitochondrial beta-oxidation of unsaturated and saturated fatty acids and is essential for the complete degradation of the fatty acids and for maximal energy yield. It catalyzes the transformation of 3-cis and 3-trans intermediates arising during the stepwise degradation of all cis-, mono-, and polyunsaturated fatty acids to the 2-trans-enoyl-CoA intermediates. Mitochondrial beta-oxidation of unsaturated fatty acids is interrupped in DCI (−/−) mice at the level of their respective 3-cis- or 3-trans-enoyl-CoA intermediates. Fasting DCI (−/−) mice accumulate unsaturated fatty acyl groups in ester lipids and deposit large amounts of triglycerides in hepatocytes (steatosis). The entire human DCI gene encompases approximately 12.5 kb, and the coding sequence is distributed over seven exons. The human DCI gene locus was assigned to chromosome 16 by use of human-rodent somatic cell hybrids and to chromosome 16p13.3 by chromosomal in situ suppression hybridization studies.

[0056] 10. Recoverin (RCV1)

[0057] Recoverin is a member of the EF-hand superfamily. It is normally expressed only in the retina and serves as a calcium sensor in retinal rod cells. A myristoyl or related fatty acyl group covalently attached to the N-terminus of recoverin facilitates the binding of recoverin to retinal disk membranes by a mechanism known as the Ca²⁺-myristoyl switch.

[0058] Aberrant expression of recoverin, however, has been observed in several cancer tissues and may cause a very rare autoimmune disease, cancer-associated retinopathy (CAR), the etiology of which is not yet clear. Autoantibodies against recoverin have been found in CAR patients with a few kinds of cancer (endothelial carcinoma, breast cancer, epithelial ovarian carcinoma, and lung cancer). As for lung cancer, the majority of CAR cases mediated by anti-recoverin autoantibodies have been revealed in patients with the most malignant lung cancer, small cell lung carcinoma (SCLC), and only one similar case has been described for a patient with non-small lung carcinoma (Bazhin et al., Lung Cancer, 34:99-104, 2001). The common feature of all these anti-recoverin-positive patients, irrespective of the type of cancer, is the presence of both the CAR syndrome and high titers (>1:1,000) of the underlying autoantibodies in their serum.

[0059] Recoverin-specific CTLs in the peripheral blood of CAR patients recognize recoverin-expressing tumor cells. An experimental mouse model has been generated to test the induction of recoverin-specific anti-tumor CTL, and to analyze retinal function using electroretinogram (ERG) (Maeda et al., Eur. J. Immunol., 32:2300-2307, 2002). It was found that a peptide, R64 (AYAQHVFRSF), derived from recoverin that induces anti-tumor CTL in humans, produced a recoverin-specific CTL response in Balb/c mice and significant growth inhibition of recoverin-expressing syngeneic MethA fibrosarcoma cells in vivo. Furthermore, elevated anti-recoverin antibodies correlated with decreased ERG amplitudes in recoverin-, recoverin-expressing-tumor- and R64-treated mice. These data suggest that recoverin contains amino acid sequences that may not only cause retinal dysfunction, but also induce anti-tumor CTL and tumor regression.

[0060] Anti-recoverin antibodies are also found to be present in patients with retinitis pigmentosa (RP). Since 40% of patients with RP have no family history, it has been suggested that some patients may have an underlying autoimmune process causing or contributing to their retinopathy. A study screening serum samples from 521 patients diagnosed with RP found anti-recoverin immunoreactivity in 10 patients without systemic malignancy but with clinical findings consistent with RP (Heckenlively, Arch. Ophthalmol., 11 8:1525-33, 2000). This result suggests that there are other immunogenic mechanisms occurring in the formation of anti-recoverin antibodies in addition to the putative tumor-mediated mechanisms. The close connection between recoverin and autoimmune diseases makes recoverin a strong candidate for lupus markers.

[0061] 11. Secreted Frizzled-Related Protein 1 (SFRP1)

[0062] SFRP is a newly discovered family of secreted glycoproteins that function to modulate signaling activity of Wnt, a family of highly conserved secreted signaling molecules that regulate cell-to-cell interactions during embryogenesis. SFRP proteins share sequence homology with the extracellular domain of the Wnt receptor (frizzled) and are capable of binding to Wnt. Thus, SFRPs function to antagonize Wnt activity by sequestering Wnt and preventing its binding to the frizzled receptor.

[0063] SFRP1 contains an N-terminal domain homologous to the putative Wnt-binding site of Frizzled (Fz domain) and a C-terminal heparin-binding domain with weak homology to netrin. Both domains are cysteine-rich, having 10 and 6 cysteines in the Fz and heparin-binding domains, respectively.

[0064] SFRP1 plays an important rule in metanephric kidney development and functions as a modulator of Wnt signaling (Yoshino et al., Mech. Dev., 192:45-55, 2001). SFRP1 is distributed throughout the medullary and cortical stroma in the metanephros, but is absent from condensed mesenchyme and primitive tubular epithelia of the developing nephron where Wnt-4 is highly expressed. In cultures of isolated, induced rat metanephric mesenchymes, SFRP1 blocked events associated with epithelial conversion (tubulogenesis and expression of lim-1, SFRP2 and E-cadherin); however, it had no demonstrable effect on early events (compaction of mesenchyme and expression of wt1). SFRP1 binds Wnt-4 with considerable avidity and inhibits the DNA-binding activity of TCF, an effector of Wnt signaling.

[0065] Wnt family of embryonic differentiation genes also modulate growth of malignant glioma cells in vitro and in vivo and inhibit cellular migration in vitro (Roth et al., Oncogene, 19:4210-4220, 2000). It was found that SFRPs promote survival under non-supportive conditions and inhibit the migration of glioma cells. It was also suggested that the regulation of these cellular processes involves expression of MMP-2 and tyrosine phosphorylation of beta-catenin. These data support a function for Wnt signaling and its modulation by SFRPs in the biology of human gliomas.

[0066] SFRP1's involvement in metanephric kidney development and the Wnt signaling pathway and its association with predisposition to LN in the MRL/MpJ mice, support a claim of the possible involvement of SFRP1 in the development of LN.

[0067] 12. Apolipoprotein M (APOM)

[0068] APOM is a recently discovered protein. It is a 26-kDa protein present in a protein extract of triglyceride-rich lipoproteins (TGRLP). The isolated APOM cDNA (734 base pairs) encoded a 188-amino acid residue-long protein. The mRNA of APOM was detected in the liver and kidney. Western blotting demonstrated APOM to be present in high density lipoprotein (HDL) and to a lesser extent in TGRLP and low density lipoproteins (LDL). The first 20 amino acid residues of APOM constituted a hydrophobic segment with characteristic features of a signal peptide. These amino acid residues, however, are retained in the mature protein because of the lack of a signal peptidase cleavage site. In vitro translation in the presence of microsomes demonstrated translocation of APOM over the membrane and glycosylation (Xu et al., J. Biol. Chem., 274:31286-31290, 1999).

[0069] Sensitive sequence searches, threading and comparative model building experiments revealed that APOM is structurally related to the lipocalin protein family. In a 3D model, characterized by an eight-stranded anti-parallel beta-barrel, a segment including Asn135 could adopt a closed or open conformation. Asn135 in wild-type APOM is glycosylated, suggesting that the segment is solvent exposed. APOM also displays two strong acidic patches of potential functional importance, one around the N-terminus and the other next to the opening of the beta-barrel (Duan, FEBS Lett., 499:127-132, 2001). It was found that platelet-activating factor (PAF) significantly enhanced the APOM mRNA levels and the secretion of APOM in HepG2 cell cultures (Xu et al., Biochem. Biophys. Res. Commun., 292:944-950, 2002). However, tumor necrosis factor alpha (TNF alpha) and interleukin-1alpha (IL-1alpha) had no effect on APOM expression in HepG2 cells. Furthermore, Lexipafant, a PAF-receptor (PAF-R) antagonist significantly suppressed the mRNA level and the secretion of APOM in HepG2 cells in a dose-dependent manner. Neither PAF nor Lexipafant influenced the mRNA levels and the secretion of APOA-1, APOB and APOE in HepG2 cells, indicating that the effects of PAF or Lexipafant on the APOM production in hepatic cells are selective for APOM.

[0070] The human APOM gene is located in the major histocompatibility complex class II region on chromosome 6. This region codes for a large number of genes crucial to pro-inflammatory response function. Therefore, despite the lack of effect of pro-inflammatory mediators TNF alpha and IL-1 alpha on APOM expression, APOM may be involved in pro- inflammatory processes. A role for APOM in such processes would be consistent with a role in the processes leading to tissue destruction seen in LN.

[0071] 13. KAI1/CD82

[0072] KAI1/CD82 is a member of the transmembrane 4 superfamily (TM4SF). It is a multifunctional molecule that is involved in activation, costimulation, and cell spreading of T cells. Studies have shown that KAI1/CD82 associates with CD4 or CD8 and delivers costimulatory signals for the TCR/CD3 pathway. Costimulation through both CD82 and CD3 induced up-regulation of both IL-2 and IFN-gamma mRNA synthesis (but not of IL-4) and an increased expression of HLA class I molecules at the cell surface, which was inhibited by anti-IFN-gamma Ab (Lebel-Binay et al., J. Immunol., 155:101-110, 1995).

[0073] It was found by sequential immunoprecipitation analysis that KAI1/CD82 is associated with HLA class I heavy chain in various B cell lines (Lagaudriere-Gesbert et al., J. Immunol., 158:2790-2797, 1997). Cocapping experiments confirmed the molecular association of CD82 and HLA class I at the cell surface of these B cell lines. These results suggest that association of CD82-MHC-I may interfere with the capacity of the MHC class I complex to protect targets from NK-mediated cytotoxicity. KAI1/CD82 is also a resident of MHC class II compartments where it associates with HLA-DR, -DM, and -DO molecules and may play an important role in the late stages of MHC class II maturation (Hammond et al., J. Immunol., 161:3282-91, 1998).

[0074] Northern blot analysis showed quite variable expression of the mouse CD82 gene among different organs. The highest expression was seen in the spleen and the kidney. The expression was low in skeletal muscle and hardly detectable in the heart.

[0075] Recently, it was found that KAI1/CD82 engagement leads to the tyrosine phosphorylation and association of both the Rho GTPases guanosine exchange factor Vav1 and adapter protein SLP76, suggesting that Rho GTPases participate in KAI1/CD82 signaling. There is also evidence for distinctive signaling of CD82- and betal integrin-mediated costimulation at the transcriptional level of IL-2 gene in human T cells. While lymphocytic infiltration and activation have long been appreciated as hallmarks of lupus nephritis, the higher than normal levels of KAI1/CD82 in kidneys in the pre-symptomatic state suggest a role for this molecule early in the disease pathway.

[0076] It should be noted that KAI1/CD82 has been identified as a prostate cancer suppressor gene. Down-regulation of KAI1/CD82 has been reported in a variety of malignancies, such as cervical carcinoma and ovarian cancer. It was also reported that over-expression of KAI1/CD82 suppresses in vivo metastasis in breast cancer cells. An analysis of tumor tissues from 151 lung cancer patients indicated that the overall survival rate of patients with KAI1/CD82-positive tumors was significantly higher than that of patients with KAI1/CD82-negative tumors, and that the overall survival rate of patients with KAI1/CD82-positive adenocarcinoma was also much higher than that of individuals whose adenocarcinoma had reduced KAI1/CD82 expression (Adachi, Cancer Res., 56:1751-1755, 1996). Multivariate analysis with the Cox regression model indicated that KAI1/CD82 positivity correlated best with the overall survival rate, except for lymph node status. These data suggest that high KAI1/CD82 gene expression by tumors of the lung may be associated with a good prognosis.

[0077] 14. FLJ22709

[0078] FLJ22709 encodes a hypothetical protein. The gene has LocusID 79629 and is reported to have cytogenetic location 19p13.12.

[0079] 15. KIAA0063

[0080] KIAA0063 has LocusID 9929 and is reported to have cytogenetic location 22ql3.1.

[0081] 16. LOC57019

[0082] LOC57019 encodes a hypothetical protein. The gene has LocusID 57019 and is reported to have cytogenetic location 16q13-q21.

[0083] 17. TIM14 (Homolog of Yeast TIM14)

[0084] The gene is similar to RIKEN cDNA 1810055D05. It has LocusID 131118 and is reported to have cytogenetic location 3q27.2.

[0085] 18. GABRB3

[0086] GABRB3 has LocusID 2562 and is reported to have cytogenetic location 15q11.2-q12. GABRB3 encodes gamma-aminobutyric acid (GABA) A receptor, beta 3. The gamma-aminobutyric acid (GABA) A receptor is a multisubunit chloride channel that mediates the fastest inhibitory synaptic transmission in the central nervous system. Alternative splicing generates at least two transcript variants. Deletion mutation of this gene may be involved in the pathogenesis of Angelman syndrome and Prader-Willi syndrome.

[0087] 19. FLJ30990

[0088] FLJ30990 encodes a hypothetical protein which has LocusID150737 and reported cytogenetic location 2q31.3.

[0089] 20. FLJ38991

[0090] FLJ38991 encodes a hypothetical protein which has LocusID 285521 and reported cytogenetic location 4q21.1.

[0091] 21. CLN6

[0092] CLN6 encodes ceroid-lipofuscinosis, neuronal 6, late infantile, variant. The gene is also known as FLJ20561 which has LocusID 54982 and reported cytogenetic location 15q22.31.

[0093] The biochemical and biological characteristics of the LRGs with known functions further support their involvement in the development or progression of auto-immune diseases such as SLE/LN. The current understanding on LRGs' structures (including secondary structures) or functions provides a basis for clinical applications of LRGs in the diagnosis, prevention, or treatment of SLE/LN.

### LRGs as Markers for SLE and LN

[0094] The LRGs of the present invention, or the polypeptides and polypeptides encoded thereby (hereinafter referred to as LRPNs and LRPPs, respectively), can be used as markers for diagnosing or monitoring SLE/LN. These markers may be components in the disease mechanism and therefore can be used as therapeutic targets for the treatment and prevention of SLE/LN. While mouse models were used for the initial differentiation expression analysis, it is well appreciated in the art that a dysfunctional gene that leads to disease in animals can also, when dysfunctional, lead to a similar syndrome in humans. The present invention encompasses human LRGs. In addition, LRGs in other organisms can also be identified and used for the study of SLE/LN or for the identification of drugs that are useful for preventing or treating SLE/LN.

[0095] Lupus is a complex disease whose clinical manifestations are diverse and variable. Patients vary with respect to both disease course and clinical response, and these variations probably reflect differences in type of lupus disease present. The LRGs of the present invention can be used to provide more precise and specific diagnoses, thereby leading to more effective therapy choices.

[0096] Polynucleotide, polypeptide, or other types of probes for the LRGs of the present invention can be prepared using a variety of methods. These probes can be used individually or coupled to carriers. In one example, the LRG probes are arrayed on solid supports (e.g., biochips) to detect LRG mRNA or proteins. In another example, anti-LRG antibodies are developed using conventional means. The probes of the present invention can be used to provide diagnosis or prognosis information for a subject of interest or to assess the efficacy of a treatment or therapy of SLE/LN. Comparison of expression levels of LRGs at different stages of the disease progression may also provide means for long-term prognosis, including survival. In addition, LRG polymorphism may be indicative of a subject's susceptibility to SLE/LN.

[0097] LRGs (including LRG promoters or other regulatory sequences) and LRG gene products can be targets for therapeutic or prophylactic agents. They can also be used to generate gene therapy vectors to inhibit SLE/LN.

[0098] Without limitation as to mechanism, the invention is based in part on the principle that modulation of LRG expression may ameliorate SLE/LN. The modulation may occur at transcriptional, post-transcriptional, translational, and post-translational levels. For example, an LRG promoter may be targeted to inhibit transcription. An LRG mRNA may be targeted by antisense molecules to prevent translation. The post-translational processing of an LRG protein, such as leader peptide removal, glycosylation and dimerization, may also be targeted.

[0099] The discovery of the LRG expression patterns in SLE/LN-affected animals allows for the screening of agents that can modulates LRG expression or LRG activity. The agents may be screened by their effects on LRG expression at the mRNA or protein level, or by their effect on the activity of the LRG product.

[0100] In one embodiment, a modulator of LRG expression or LRG activity may be used as a therapeutic agent for SLE or LN. The modulator may be a polynucleotide (such as an antisense oligonucleotide or an RNAi sequence), a polypeptide (such as an anti-LRG antibody), an LRG mutant having a dominant negative effect on an activity of the wild-type LRG, a viral or non-viral gene therapy vector, or any other small molecule or biomolecule that is capable of inhibiting LRG activity or LRG expression. The formulation of such a modulator into pharmaceutical compositions is described below.

### Isolated LRG Polynucleotides

[0101] One aspect of the invention pertains to isolated polynucleotide fragments sufficient for use as hybridization probes to identify LRG products in a sample, as well as nucleotide fragments for use as PCR primers of the amplification or mutation of the nucleic acid molecules which encode an LRPP of the present invention. Another aspect of the invention pertains to isolated polynucleotides that encode an LRPP, or a fragment or mutant thereof.

[0102] A polynucleotide molecule comprising an LRPP, or a homolog, fragment or variant thereof, can be isolated using standard molecular biology techniques. An LRG polynucleotide variant includes polynucleotides that are capable of hybridizing to the original polynucleotide, or the complement thereof, under reduced stringent conditions. In many embodiments, a variant can hybridize to the original polynucleotide, or the complement thereof, under stringent conditions or highly stringent conditions. Examples of conditions of different stringency are listed in Table 2. Highly stringent conditions are those that are at least as stringent as conditions A-F; stringent conditions are at least as stringent as conditions G-L; and reduced stringency conditions are at least as stringent as conditions M-R. As used in Table 2, hybridization is carried out under a given hybridization condition for about 2 hours, followed by two 15-minute washes under the corresponding washing condition(s).

TABLE 2
Stringency Conditions

| Stringency | Poly-nucleotide | Hybrid | Hybridization | Wash Temp. |
|---|---|---|---|---|
| Condition | Hybrid | Length (bp)¹ | Temperature and Buffer^{H} | And Buffer^{H} |
| A | DNA:DNA | >50 | 65° C.; 1xSSC -or- | 65° C.; 0.3xSSC |
| | | | 42°; 1xSSC, 50% formamide | |
| B | DNA:DNA | >50 | T_{B}*; 1xSSC | T_{B}*; 1xSSC |
| C | DNA:RNA | >50 | 67° C.; 1xSSC -or- | 67° C.; 0.3xSSC |
| | | | 45° C.; 1xSSC, 50% formamide | |
| D | DNA:RNA | >50 | Tₚ*; 1SSX | Tₚ*; 1SSX |
| E | RNA:RNA | >50 | 70° C.; 1xSSC -or- | 70° C.; 0.3xSSC |
| | | | 50° C.; 1xSSC, 50% formamide | |
| F | RNA:RNA | >50 | T_{F}*; 1xSSC | T_{F}*; 1xSSC |
| G | DAN:DNA | >50 | 65° C.; 4xSSC -or- | 65° C.; 1xSSC |
| | | | 42° C.; 4xSSC, 50% formamide | |
| H | DNA:DNA | >50 | T_{H}*; 4xSSC | T_{H}*; 4xSSC |
| I | DNA:RNA | >50 | 67° C.; 4xSSC -or- | 67° C.; 1xSSC |
| | | | 45° C.; 4xSSC; 50% formamide | |
| J | DNA:RNA | >50 | T_{J}*; 4xSSC | T_{J}*; 4xSSC |
| K | RNA:RNA | >50 | 70° C.; 4xSSC -or- | 67° C.; 1xSSC |
| | | | 50° C.; 4xSSC, 50% formamide | |
| L | RNA:RNA | >50 | T_{L}*; 2xSSC | T_{L}*; 2xSSC |
| M | DNA:DNA | >50 | 50° C.; 4xSSC -or- | 50° C.; 2xSSC |
| | | | 40° C.; 6xSSC, 50% formamide | |
| N | DNA:DNA | >50 | T_{N}*; 6xSSC | T_{N}*; 6xSSC |
| O | DNA:RNA | >50 | 55° C.; 4xSSC -or- | 55° C.; 4xSSC |
| | | | 42° C.; 6xSSC, 50% formamide | |
| P | DNA:RNA | >50 | T_{P}*; 6xSSC | T_{P}*; 6xSSC |
| Q | RNA:RNA | >50 | 60° C.; 4xSSC -or- | 60° C.; 2xSSC |
| | | | 45° C.; 6xSSC, 50% formamide | |
| R | RNA:RNA | >50 | T_{R}*; 4xSSC | T_{R}*; 4xSSC |
| ¹The hybrid length is that anticipated for the hybridized region(s) of the hybridizing polynucleotides. When hybridizing a polynucleotide to a target polynucleotide of unknown sequence, the hybrid length is assumed to be that of the hybridizing polynucleotide. When polynucleotides of known sequences are hybridized, the hybrid length can be determined by aligning the sequences of the polynucleotides and identifying the region or regions of optimal sequence complementarity. | | | | |
| ^{H}SSPE (1xSSPE is 0.15 M NaCl, 10 mM NaH₂PO₄, and 1.25 mM EDTA, pH 7.4) can be substituted for SSC (1xSSC is O.15 M NaCl and 15 mM sodium citrate) in the hybridization and wash buffers. | | | | |
| T_{B}* -T_{R}*: The hybridization temperature for hybrids anticipated to be less than 50 base pairs in length should be 5-10° C. less than the melting temperature (Tₘ) of the hybrid, where Tₘ is determined according to the following equations. For hybrids less than 18 base pairs in length, Tₘ(° C.) = 2(# of A + T bases) + 4(# of G + bases). | | | | |
| # For hybrids between 18 and 49 base pairs in length, Tₘ(° C.) = 8 1.5 + 16.6(log₁₀Na⁺) + 0.41 (% G + C) − (600/N), where N is the number of bases in the hybrid, and Na⁺ is the molar concentration of sodium ions in the hybridization buffer (Na⁺ for 1xSSC = 0.165 M). | | | | |

[0103] An LRG polynucleotide variant of the present invention may differ from its original LRG polynucleotide by one or more substitutions, additions, and/or deletions. For instance, an LRG polynucleotide variant can have 1, 2, 5, 10, 15, 20, 25 or more nucleotide substitutions, additions or deletions. In one embodiment, the modification(s) is in-frame such that the modified polynucleotide can be transcribed and translated to the original or intended stop codon. In another embodiment, the biological activity is reduced/enhanced by less than 50%, 40%, 30%, 20%, 10% or lesser as compared to the original activity.

[0104] Probes or primers for detecting or amplifying LRGs or their transcripts can be DNA, RNA, PNA, or other forms of polynucleotides. The probes or primers can have any desirable length. For instance, the probes/primers can have at least about 7, 15, 25, 50, 75, 100, 125, 150, 175, 200, 225, 250, 275, 300, 325, 350, 400 or more consecutive nucleotides. of an LRG, or a polynucleotide transcribed thereof. In many embodiments, the probes or primers can hybridize under stringent conditions to the respective LRG transcripts, or the complements thereof.

[0105] In one embodiment, LRG probes comprise label groups. The label groups can be, for example, a radioisotope, a fluorescent compound, an enzyme, or an enzyme co-factor. Such probes can be used as a part of a diagnostic or test kit for identifying cells or tissue in which an LRG is differentially expressed (e.g., over- or under-expressed), or in which greater or fewer copies of an LRG exist.

[0106] The invention also encompasses homologs of the LRGs of other species. Gene homologs are well understood in the art and are identifiable from databases such as the Pubmed-Entrez database.

[0107] In addition, the invention encompasses polynucleotide molecules which are structurally different from the original molecules but substantially retain their original functions or other properties. Such molecules include allelic variants as described below.

[0108] In addition to the nucleotide sequences of the LRGs, it will be appreciated by those skilled in the art that DNA sequence polymorphisms that lead to changes in the amino acid sequences of the proteins encoded by the LRGs may exist within a population (e.g., the human population). Such genetic polymorphisms in the LRGs may exist among individuals within a population due to natural allelic variation. An allele is one of a group of genes which occur alternatively at a given genetic locus. In addition, it will be appreciated that DNA polymorphisms that affect RNA expression levels can also exist that may affect the overall expression level of that gene (e.g., by affecting regulation or degradation). As used herein, the phrase “allelic variant” includes a nucleotide sequence which occurs at a given locus and a polypeptide encoded by the nucleotide sequence.

[0109] In addition to naturally-occurring allelic variants of an LRG that may exist in the population, the skilled artisan will further appreciate that changes can be introduced by mutation into the nucleotide sequences of the LRG, thereby leading to changes in the amino acid sequence of the encoded proteins, without altering the functional activity of these proteins. For example, nucleotide substitutions leading to amino acid substitutions at “non-essential” amino acid residues can be made. A “non-essential” amino acid residue is a residue that can be altered from the wild-type sequence of a protein without altering the biological activity, whereas an “essential” amino acid residue is required for biological activity. For example, amino acid residues that are conserved among allelic variants or homologs of a gene (e.g., among homologs of a gene from different species) may be predicted to be unamenable to alteration.

[0110] Accordingly, another aspect of the invention pertains to polynucleotides encoding the LRG proteins that contain changes in amino acid residues that are not essential for activity. Such proteins differ in amino acid sequence from the original LRG protein encoded by the LRG, yet retain biological activity. In one embodiment, the protein comprises an amino acid sequence that has at least about 60%, 65%, 70%, 75%, 80%, 85%, 90%, 95%, 98% or more sequence identity or similarity to an LRG protein.

[0111] In yet other aspect of the invention, the polynucleotides of the LRGs may comprise one or more mutations. An isolated polynucleotide molecule encoding a protein with a mutation can be created by introducing one or more nucleotide substitutions, additions or deletions into the nucleotide sequence of the polynucleotide, such that one or more amino acid substitutions, additions or deletions are introduced into the encoded protein. Such techniques are well-known in the art. Mutations can be introduced into an LRG by standard techniques, such as site-directed mutagenesis and PCR-mediated mutagenesis. In many cases, conservative amino acid substitutions can be made at one or more predicted non-essential amino acid residues. Alternatively, mutations can be introduced randomly along all or part of a coding sequence of the LRG or cDNA, such as by saturation mutagenesis, and the resultant mutants can be screened for biological activity to identify mutants that retain activity. Following mutagenesis, the encoded protein can be expressed recombinantly and the activity of the protein can be determined.

[0112] In yet another aspect of the invention, a polynucleotide may encode an LRPP containing mutations in amino acid residues which result in inhibition of LRPP activity after dimerization with a wild-type LRPP. These mutated LRPPs may be used to inhibit LRPP activity in an SLE/LN patient.

[0113] A polynucleotide may be further modified to increase stability in vivo. Possible modifications include, but are not limited to, the addition of flanking sequences at the 5′ and/or 3′ ends; the use of phosphorothioate or 2-o-methyl rather than phosphodiesterase linkages in the backbone; and/or the inclusion of nontraditional bases such as inosine, queosine and wybutosine, as well as acetyl- methyl-, thio- and other modified forms of adenine, cytidine, guanine, thymine and uridine.

[0114] Another aspect of the invention pertains to isolated polynucleotide molecules, which are antisense to an LRG. An “antisense” polynucleotide comprises a nucleotide sequence which is complementary to a “sense” polynucleotide that encodes a protein, e.g., complementary to the coding strand of a double-stranded cDNA molecule or complementary to an mRNA sequence. Accordingly, an antisense polynucleotide can form hydrogen bonds with a sense polynucleotide. The antisense polynucleotide can be complementary to an entire coding strand of a gene of the invention or to only a portion thereof. In one embodiment, an antisense polynucleotide molecule is antisense to a “coding region” of the coding strand of a nucleotide sequence of the invention. The term “coding region” includes the region of the nucleotide sequence comprising codons which are translated into amino acids. In another embodiment, the antisense polynucleotide molecule is antisense to a “noncoding region” of the coding strand of a nucleotide sequence of the invention.

[0115] Antisense polynucleotides of the invention can be designed according to the rules of Watson and Crick base pairing. The antisense polynucleotide molecule can be complementary to the entire coding region of an mRNA corresponding to a gene of the invention, but it can also be an oligonucleotide which is antisense to only a portion of the coding or noncoding region. An antisense oligonucleotide can be, for example, about 5, 10, 15, 20, 25, 30, 35, 40, 45 or 50 nucleotides in length. An antisense polynucleotide of the invention can be constructed using chemical synthesis and enzymatic ligation reactions using procedures known in the art. For example, an antisense polynucleotide (e.g., an antisense oligonucleotide) can be chemically synthesized using naturally occurring nucleotides or variously modified nucleotides designed to increase the biological stability of the molecules or to increase the physical stability of the duplex formed between the antisense and sense polynucleotides, e.g., phosphorothioate derivatives and acridine substituted nucleotides can be used. Examples of modified nucleotides which can be used to generate the antisense polynucleotide include 5-fluorouracil, 5-bromouracil, 5-chlorouracil, 5-iodouracil, hypoxanthine, xanthine, 4-acetylcytosine, 5-(carboxyhydroxymethyl) uracil, 5-carboxymethylaminomethyl-2-thiouridine, 5-carboxymethylaminomethyluracil, dihydrouracil, beta-D-galactosylqueosine, inosine, N6-isopentenyladenine, 1-methylguanine, 1-methylinosine, 2,2-dimethylguanine, 2-methyladenine, 2-methylguanine, 3-methylcytosine, 5-methylcytosine, N6-adenine, 7-methylguanine, 5-methylaminomethyluracil, 5-methoxyaminomethyl-2-thiouracil, beta-D-mannosylqueosine, 5′-methoxycarboxymethyluracil, 5-methoxyuracil, 2-methylthio-N6-isopentenyladenosine, uracil-5-oxyacetic acid (v), wybutoxosine, pseudouracil, queosine, 2-thiocytosine, 5-methyl-2-thiouracil, 2-thiouracil, 4-thiouracil, 5-methyluracil, uracil-5-oxyacetic acid methylester, 3-(3-amino-3-N-2-carboxypropyl) uracil, (acp3)w, and 2,6-diaminopurine. Alternatively, the antisense polynucleotide can be produced biologically using an expression vector into which a polynucleotide has been subcloned in an antisense orientation.

[0116] The antisense polynucleotide molecules of the invention are typically administered to a subject or generated in situ such that they hybridize with or bind to cellular mRNA and/or genomic DNA encoding an LRG to thereby inhibit expression of the protein, e.g., by inhibiting transcription and/or translation. The hybridization can be by conventional nucleotide complementarity to form a stable duplex, or, for example, in the cases of an antisense polynucleotide molecule which binds to DNA duplexes, through specific interactions in the major groove of the double helix. An example of a route of administration of antisense polynucleotide molecules of the invention includes direct injection at a tissue site (e.g., intestine or blood). Alternatively, antisense polynucleotide molecules can be modified to target selected cells and then administered systemically. For example, for systemic administration, antisense molecules can be modified such that they specifically bind to receptors or antigens expressed on a selected cell surface, e.g., by linking the antisense polynucleotide molecules to peptides or antibodies which bind to cell surface receptors or antigens. The antisense polynucleotide molecules can also be delivered to cells using the vectors described herein. To achieve sufficient intra-cellular concentrations of the antisense molecules, vector constructs in which the antisense polynucleotide molecule is placed under the control of a strong promoter can be used.

[0117] In yet another embodiment, the antisense polynucleotide molecule of the invention is an α-anomeric polynucleotide molecule. An α-anomeric polynucleotide molecule forms specific double-stranded hybrids with complementary RNA in which, contrary to the usual β-units, the strands run parallel to each other. The antisense polynucleotide molecule can also comprise a 2-o-methylribonucleotide or a chimeric RNA-DNA analogue.

[0118] In still another embodiment, an antisense polynucleotide is a ribozyme. Ribozymes are catalytic RNA molecules with ribonuclease activity which are capable of cleaving a single-stranded polynucleotide, such as an mRNA, to which they have a complementary region. Thus, ribozymes can be used to catalytically cleave mRNA transcripts of an LRG to thereby inhibit translation of said mRNA. A ribozyme having specificity for an LRG can be designed based upon the nucleotide sequence of the LRG. An mRNA transcribed from an LRG can be used to select a catalytic RNA having a specific ribonuclease activity from a pool of RNA molecules. Alternatively, expression of an LRG can be inhibited by targeting nucleotide sequences complementary to the regulatory region of these genes (e.g., the promoter and/or enhancers) to form triple helical structures that prevent transcription of the gene in target cells.

[0119] Expression of an LRG can also be inhibited using RNA interference (RNAᵢ). This is a technique for post-transcriptional gene silencing (“PTGS”), in which target gene activity is specifically abolished with cognate double-stranded RNA (“dsRNA”). In many embodiments, dsRNA of about 21 nucleotides, homologous to the target gene, is introduced into the cell and a sequence specific reduction in gene activity is observed. RNA interference provides a mechanism of gene silencing at the mRNA level. RNAi offers an efficient and broadly applicable approach for gene knock-out as well as for therapeutic purposes.

[0120] Sequences capable of inhibiting gene expression by RNA interference can have any desired length. For instance, the sequence can have at least 15, 20, 25, or more consecutive nucleotides. The sequence can be dsRNA or any other type of polynucleotide, provided that the sequence can form a functional silencing complex to degrade the target mRNA transcript.

[0121] In one embodiment, the sequence comprises or consists of a short interfering RNA (siRNA). The siRNA can be, for example, dsRNA having 19-25 nucleotides. siRNAs can be produced endogenously by degradation of longer dsRNA molecules by an RNase III-related nuclease called Dicer. siRNAs can also be introduced into a cell exogenously or by transcription of an expression construct. Once formed, the siRNAs assemble with protein components into endoribonuclease-containing complexes known as RNA-induced silencing complexes (RISCs). An ATP-generated unwinding of the siRNA activates the RISCs, which in turn target the complementary mRNA transcript by Watson-Crick base-pairing, thereby cleaving and destroying the mRNA. Cleavage of the mRNA takes place near the middle of the region bound by the siRNA strand. This sequence-specific mRNA degradation results in gene silencing.

[0122] At least two ways can be employed to achieve siRNA-mediated gene silencing. First, siRNAs can be synthesized in vitro and introduced into cells to transiently suppress gene expression. Synthetic siRNA provides an easy and efficient way to achieve RNAi. siRNA are duplexes of short mixed oligonucleotides which can include, for example, 19 nucleotides with symmetric dinucleotide 3′ overhangs. Using synthetic 21 bp siRNA duplexes (e.g., 19 RNA bases followed by a UU or dTdT 3′ overhang), sequence-specific gene silencing can be achieved in mammalian cells. These siRNAs can specifically suppress targeted gene translation in mammalian cells without activation of DNA-dependent protein kinase (PKR) by longer dsRNA, which may result in non-specific repression of translation of many proteins.

[0123] Second, siRNAs can be expressed in vivo from vectors. This approach can be used to stably express siRNAs in cells or transgenic animals. In one embodiment, siRNA expression vectors are engineered to drive siRNA transcription from polymerase III (pol III) transcription units. Pol III transcription units are suitable for hairpin siRNA expression, since they deploy a short AT rich transcription termination site that leads to the addition of 2 bp overhangs (e.g., UU) to hairpin siRNAs—a feature that is helpful for siRNA function. The Pol III expression vectors can also be used to create transgenic mice that express siRNA.

[0124] In another embodiment, siRNAs can be expressed in a tissue-specific manner. Under this approach, long double-stranded RNAs (dsRNAs) are first expressed from a tissue-specific promoter in the nuclei of selected cell lines or transgenic mice. The long dsRNAs are processed into siRNAs in the nuclei (e.g., by Dicer). The siRNAs exit from the nuclei and mediate gene-specific silencing. A similar approach can be used in conjunction with tissue-specific promoters to create tissue-specific knockdown mice.

[0125] Any 3′ dinucleotide overhang, such as UU, can be used for siRNA design. In some cases, G residues in the overhang are avoided because of the potential for the siRNA to be cleaved by RNase at single-stranded G residues.

[0126] With regard to the siRNA sequence itself, it has been found that siRNAs with 30-50% GC content can be more active than those with a higher G/C content in certain cases. Moreover, since a 4-6 nucleotide poly(T) tract may act as a termination signal for RNA pol III, stretches of>4 Ts or As in the target sequence may be avoided in certain cases when designing sequences to be expressed from an RNA pol III promoter. In addition, some regions of mRNA may be either highly structured or bound by regulatory proteins. Thus, it may be helpful to select siRNA target sites at different positions along the length of the gene sequence. Finally, the potential target sites can be compared to the appropriate genome database (human, mouse, rat, etc.). Any target sequences with more than 16-17 contiguous base pairs of homology to other coding sequences may be eliminated from consideration in certain cases.

[0127] In one embodiment, siRNA is designed to have two inverted repeats separated by a short spacer sequence and end with a string of Ts that serve as a transcription termination site. This design produces an RNA transcript that is predicted to fold into a short hairpin siRNA. The selection of siRNA target sequence, the length of the inverted repeats that encode the stem of a putative hairpin, the order of the inverted repeats, the length and composition of the spacer sequence that encodes the loop of the hairpin, and the presence or absence of 5′-overhangs, can vary to achieve desirable results.

[0128] The siRNA targets can be selected by scanning an mRNA sequence for AA dinucleotides and recording the 19 nucleotides immediately downstream of the AA. Other methods can also been used to select the siRNA targets. In one example, the selection of the siRNA target sequence is purely empirically determined (see, e.g., Sui et al, Proc. Natl. Acad. Sci. USA 99: 5515-5520, 2002), as long as the target sequence starts with GG and does not share significant sequence homology with other genes as analyzed by BLAST search. In another example, a more elaborate method is employed to select the siRNA target sequences. This procedure exploits an observation that any accessible site in endogenous mRNA can be targeted for degradation by synthetic oligodeoxyribonucleotide /RNase H method (Lee et al, Nature Biotechnology 20:500-505, 2002).

[0129] In another embodiment, the hairpin siRNA expression cassette is constructed to contain the sense strand of the target, followed by a short spacer, the antisense strand of the target, and 5-6 Ts as transcription terminator. The order of the sense and antisense strands within the siRNA expression constructs can be altered without affecting the gene silencing activities of the hairpin siRNA. In certain instances, the reversal of the order may cause partial reduction in gene silencing activities.

[0130] The length of nucleotide sequence being used as the stem of siRNA expression cassette can range, for instance, from 19 to 29. The loop size can range from 3 to 23 nucleotides. Other lengths and/or loop sizes can also be used.

[0131] In yet another embodiment, a 5′ overhang in the hairpin siRNA construct can be used, provided that the hairpin siRNA is functional in gene silencing. In one example, the 5′ overhang includes about 6 nucleotide residues.

[0132] In still yet another embodiment, the target sequences for RNAi are about 21-mer sequence fragments selected from LRG coding sequences, such as SEQ ID NOS:1-29. The target sequences can be selected from either ORF regions or non-ORF regions. The 5′ end of each target sequence has dinucleotide “NA,” where “N” can be any base and “A” represents adenine. The remaining 19-mer sequence has a GC content of between 30% and 65%. In many examples, the remaining 19-mer sequence does not include any four consecutive A or T (i.e., AAAA or TTTT), three consecutive G or C (i.e., GGG or CCC), or seven “GC” in a row. Examples of the target sequences prepared using the above-described criteria (“Relaxed Criteria”) are illustrated in Table 3. Each target sequence in Table 3 has SEQ ID NO:3n+1, and the corresponding siRNA sense and antisense strands have SEQ ID NO:3n+2 and SEQ ID NO:3n+3, respectively, where n is a positive integer. For each LRG coding sequence (e.g., SEQ ID NOS:1-29), multiple target sequences can be selected.

[0133] Additional criteria can be used for RNAi target sequence design. In one example, the GC content of the remaining 19-mer sequence is limited to between 35% and 55%, and any 19-mer sequence having three consecutive A or T (i.e., AAA or TTT) or a palindrome sequence with 5 or more bases is excluded. In addition, the 19-mer sequence can be selected to have low sequence homology to other human genes. In one embodiment, potential target sequences are searched by BLASTN against NCBI's human UniGene cluster sequence database. The human UniGene database contains non-redundant sets of gene-oriented clusters. Each UniGene cluster includes sequences that represent a unique gene. 19-mer sequences producing no hit to other human genes under the BLASTN search can be selected. During the search, the e-value may be set at a stringent value (such as “1”). Furthermore, the target sequence can be selected from the ORF region, and is at least 75-bp frorii the start and stop codons. Examples of the target sequences prepared using these criteria (“Stringent Criteria”) are demonstrated in Table 3 (SEQ ID NO:3n+1, where n is a positive integer). siRNA sense and antisense sequences (SEQ ID NO:3n+2 and SEQ ID NO:3n+3, respectively) for each target sequence (SEQ ID NO:3n+1) are also provided.

TABLE 3
RNAi Target Sequences and siRNA Sequences

| | Relaxed Criteria | Stringent Criteria |
|---|---|---|
| | (target: SEQ ID NO: 3n + 1; | (target: SEQ ID NO: 3n + 1; |
| SEQ ID NO | siRNA sense: SEQ ID NO: 3n + 2; | siRNA sense: SEQ ID NO: 3n + 2; |
| (LRG coding seq.) | siRNA antisense: SEQ ID NO: 3n + 3) | siRNA antisense: SEQ ID NO: 3n + 3) |
| SEQ ID NO: 1 | SEQ ID NOS: 58-390 | SEQ ID NOS: 391-414 |
| SEQ ID NO: 2 | SEQ ID NOS: 415-2,277 | SEQ ID NOS: −2,278-2,670 |
| SEQ ID NO: 3 | SEQ ID NOS: 2,671-2,778 | |
| SEQ ID NO: 4 | SEQ ID NOS: 2,779-2,961 | SEQ ID NOS: 2,962-2,982 |
| SEQ ID NO: 5 | SEQ ID NOS: 2,983-3,246 | SEQ ID NOS: 3,247-3,291 |
| SEQ ID NO: 6 | SEQ ID NOS: 3,292-3,948 | SEQ ID NOS: 3,949-3,993 |
| SEQ ID NO: 7 | SEQ ID NOS: 3,994-4,677 | SEQ ID NOS: 4,678-4,731 |
| SEQ ID NO: 8 | SEQ ID NOS: 4,732-5,388 | SEQ ID NOS: 5,389-5,439 |
| SEQ ID NO: 9 | SEQ ID NOS: 5,440-6,345 | SEQ ID NOS: 6,346-6,372 |
| SEQ ID NO: 10 | SEQ ID NOS: 6,373-8,514 | SEQ ID NOS: 8,515-8,664 |
| SEQ ID NO: 11 | SEQ ID NOS: 8,665-10,740 | SEQ ID NOS: 10,741-10,884 |
| SEQ ID NO: 12 | SEQ ID NOS: 10,885-11,151 | SEQ ID NOS: 11,152-11,157 |
| SEQ ID NO: 13 | SEQ ID NOS: 11,158-11,346 | SEQ ID NOS: 11,347-11,349 |
| SEQ ID NO: 14 | SEQ ID NOS: 11,350-11,691 | SEQ ID NOS: 11,692-11,703 |
| SEQ ID NO: 15 | SEQ ID NOS: 11,704-12,795 | SEQ ID NOS: 12,796-12,810 |
| SEQ ID NO: 16 | SEQ ID NOS: 12,811-13,014 | SEQ ID NOS: 13,015-13,032 |
| SEQ ID NO: 17 | SEQ ID NOS: 13,033-13,287 | SEQ ID NOS: 13,288-13,308 |
| SEQ ID NO: 18 | SEQ ID NOS: 13,309-13,512 | SEQ ID NOS: 13,513-13,533 |
| SEQ ID NO: 19 | SEQ ID NOS: 13,534-14,484 | SEQ ID NOS: 14,485-14,508 |
| SEQ ID NO: 20 | SEQ ID NOS: 14,509-15,240 | SEQ ID NOS: 15,241-15,258 |
| SEQ ID NO: 21 | SEQ ID NOS: 15,259-15,624 | |
| SEQ ID NO: 22 | SEQ ID NOS: 15,625-15,954 | |
| SEQ ID NO: 23 | SEQ ID NOS: 15,955-16,299 | |
| SEQ ID NO: 24 | SEQ ID NOS: 16,300-16,653 | |
| SEQ ID NO: 25 | SEQ ID NOS: 16,654-17,712 | SEQ ID NOS: 17,713-17,832 |
| SEQ ID NO: 26 | SEQ ID NOS: 17,833-18,900 | SEQ ID NOS: 18,901-19,008 |
| SEQ ID NO: 27 | SEQ ID NOS: 19,009-19,806 | SEQ ID NOS: 19,807-19,842 |
| SEQ ID NO: 28 | SEQ ID NOS: 19,843-20,673 | SEQ ID NOS: 20,674-20,751 |
| SEQ ID NO: 29 | SEQ ID NOS: 20,752-21,102 | SEQ ID NOS: 21,103-21,135 |

[0134] The effectiveness of the siRNA sequences can be evaluated using various methods known in the art. For instance, an siRNA sequence of the present invention can be introduced into a cell that over-expresses an LRG. The polypeptide or mRNA level of the LRG in the cell can be detected. A substantial change in the expression level of the LRG before and after the introduction of the siRNA sequence is indicative of the effectiveness of the siRNA sequence in suppressing the expression of the LRG. In one example, the expression levels of other genes are also monitored before and after the introduction of the siRNA sequence. An siRNA sequence which has inhibitory effect on the LRG expression but does not significantly affect the expression of other genes can be selected. In another example, multiple siRNA or other RNAi sequences can be introduced into the same target cell. These siRNA or RNAi sequences specifically inhibit the LRG gene expression but not the expression of other genes. In yet another example, siRNA or other RNAi sequences that inhibit the expression of both the LRG gene and other gene or genes can be used.

[0135] In yet another embodiment, the polynucleotide molecules of the present invention can be modified at the base moiety, sugar moiety or phosphate backbone to improve, e.g., the stability, hybridization, or solubility of the molecule. For example, the deoxyribose phosphate backbone of the polynucleotide molecules can be modified to generate peptide polynucleotides. As used herein, the terms “peptide polynucleotides” or “PNAs” refer to polynucleotide mimics, e.g., DNA mimics, in which the deoxyribose phosphate backbone is replaced by a pseudopeptide backbone and only the four natural nucleobases are retained. The neutral backbone of PNAs has been shown to allow for specific hybridization to DNA and RNA under conditions of low ionic strength. The synthesis of PNA oligomers can be performed using standard solid phase peptide synthesis protocols.

[0136] PNAs can be used in therapeutic and diagnostic applications. For example, PNAs can be used as antisense agents for sequence-specific modulation of LRG expression by, for example, inducing transcription or translation arrest or inhibiting replication. PNAs of the polynucleotide molecules of the invention can also be used in the analysis of single base pair mutations in a gene e.g., by PNA-directed PCR clamping, as artificial restriction enzymes when used in combination with other enzymes (e.g., S1 nucleases) or as probes or primers for DNA sequencing or hybridization.

[0137] In another embodiment, PNAs can be modified, (e.g., to enhance their stability or cellular uptake), by attaching lipophilic or other helper groups to PNA, by the formation of PNA-DNA chimeras, or by the use of liposomes or other techniques of drug delivery known in the art. For example, PNA-DNA chimeras of the poiynucleotide molecules of the invention can be generated which may combine the advantageous properties of PNA and DNA. Such chimeras allow DNA recognition enzymes, (e.g., DNA polymerases), to interact with the DNA portion while the PNA portion would provide high binding affinity and specificity. PNA-DNA chimeras can be linked using linkers of appropriate lengths selected in terms of base stacking, number of bonds between the nucleobases, and orientation. The synthesis of PNA-DNA chimeras can be performed. For example, a DNA chain can be synthesized on a solid support using standard phosphoramidite coupling chemistry and modified nucleoside analogs, e.g., 5′-(4-methoxytrityl)amino-5′-deoxy-thymidine phosphoramidite, can be used as a spacer between the PNA and the 5′ end of DNA. PNA monomers are then coupled in a stepwise manner to produce a chimeric molecule with a 5′ PNA segment and a 3′ DNA segment. Alternatively, chimeric molecules can be synthesized with a 5′ DNA segment and a 3′ PNA segment.

[0138] In other embodiments, the oligonucleotide may include other appended groups such as peptides (e.g., for targeting host cell receptors in vivo), or agents facilitating transport across the cell membrane or the blood-kidney barrier (see, e.g., PCT Publication No. W089/10134). In addition, oligonucleotides can be modified with hybridization-triggered cleavage agents or intercalating agents. To this end, the oligonucleotide may be conjugated to another molecule (e.g., a peptide, hybridization triggered cross-linking agent, transport agent, or hybridization-triggered cleavage agent). Finally, the oligonucleotide may be detectably labeled, either such that the label is detected by the addition of another reagent (e.g., a substrate for an enzymatic label), or is detectable immediately upon hybridization of the nucleotide (e.g., a radioactive label or a fluorescent label).

### Isolated Polypeptides

[0139] Several aspects of the invention pertain to isolated LRPPs and mutated LRPPs capable of inhibiting normal LRPP activity, as well as polypeptide fragments suitable for use as immunogens to raise anti-LRPP antibodies. In one embodiment, native LRPPs can be isolated from cells or tissue sources by an appropriate purification scheme using standard protein purification techniques. The degree of purification necessary will vary depending on the use of the LRPP. In some instances, no purification will be necessary.

[0140] In another embodiment, LRPPs or mutated LRPPs capable of inhibiting normal LRPP activity (dominant-negative mutants) are produced by recombinant DNA techniques. Alternatively, an LRPP or mutated LRPP can be synthesized chemically using standard peptide synthesis techniques.

[0141] The invention provides polypeptides encoded by human LRGs, such as SEQ ID NOS: 30-57. The invention also provides polypeptides that are substantially homologous to an LRPP, retaining the functional activity of the LRPP yet differing in amino acid sequence due to natural allelic variation or mutagenesis. In one embodiment, the LRPPs are variants which have at least about 60%, 65%, 70%, 75%, 80%, 85%, 90%, 95%, 98% or more sequence identity or similarity to the original LRPPs (e.g., SEQ ID NOS: 30-57) or the fragments thereof.

[0142] To determine the percent identity or similarity of two amino acid sequences or two nucleotide sequences, the sequences are aligned for optimal comparision purposes (e.g., gaps can be introduced in one or both of a first and second amino acid or polynucleotide sequence for optimal alignment and non-homologous sequences can be disregarded for comparison purposes). The percent identity or similarity between two sequences is a function of the number of identical or similar positions shared by the sequences, taking into account the number of gaps, and the length of each gap, which need to be introduced for optimal alignment of the two sequences.

[0143] The comparison of sequences and determination of percent identity between two sequences can be accomplished using a mathematical algorithm. In one embodiment, the percent identity between two amino acid sequences is determined using the Needleman and Wunsch (J. Mol. Biol., 48:444-453, 1970) algorithm which has been incorporated into the GAP program in the GCG software package, using either a Blossom 62 matrix or a PAM250 matrix, and a gap weight of 16, 14, 12, 10, 8, 6, or 4 and a length weight of 1, 2, 3, 4, 5, or 6. In yet another embodiment, the percent identity between two nucleotide sequences is determined using the GAP program in the GCG software package, using a NWSgapdna.CMP matrix and a gap weight of 40, 50, 60, 70, or 80 and a length weight of 1, 2, 3, 4, 5, or 6.

[0144] The polynucleotide and protein sequences of the present invention can further be used as a “query sequence” to perform a search against public databases to, for example, identify other family members or related sequences. Such searches can be performed using the BLAST programs available at the BLAST website maintained by the National Center for Biotechnology Information at the National Institute of Health, Washington, DC.

[0145] The invention also provides chimeric or fusion LRPP. A fusion LRPP contains an LRG-related polypeptide and a non-LRG polypeptide fused in-frame to each other. The LRG-related polypeptide corresponds to all or a portion of an LRPP or its variant. In one embodiment, a fusion LRPP comprises at least one portion of an LRPP sequence recited in one of SEQ ID NOS:14-26.

[0146] A peptide linker sequence may be employed to separate the LRG-related polypeptide from non-LRG polypeptide components by a distance sufficient to ensure that each polypeptide folds into its secondary and tertiary structures. Such a peptide linker sequence is incorporated into the fusion protein using standard techniques well-known in the art. Suitable peptide linker sequences may be chosen based on the following factors (1) their ability to adopt a flexible extended conformation; (2) their inability to adopt a secondary structure that could interact with functional epitopes on the LRG-related polypeptide and non-LRG polypeptide, and (3) the lack of hydrophobic or charged residues that might react with the polypeptide functional epitopes. Exemplary peptide linker sequences contain gly, asn and ser residues. Other near neutral amino acids, such as thr and ala may also be used in the linker sequence. Amino acid sequences which may be usefully employed as linkers include those disclosed in Maratea et al., Gene, 40:39-46, 1985; Murphy et al., Proc. Natl. Acad. Sci. USA 83:8258-8262, 1986; U.S. Pat. No. 4,935,233 and U.S. Pat. No. 4,751,180. The linker sequence may generally be from 1 to about 50 amino acids in length. Linker sequences are not required when the LRG-related polypeptide and non-LRG polypeptide have non-essential N-terminal amino acid regions that can be used to separate the functional domains and prevent steric interference.

[0147] For example, in one embodiment, the fusion protein is a glutathione s-transferase (GST)-LRPP fusion protein in which the LRG-related sequences are fused to the C-terminus of the GST sequences. Such fusion proteins can facilitate the purification of recombinant LRPPs.

[0148] The LRPP-fusion proteins of the invention can be incorporated into pharmaceutical compositions and administered to a subject in vivo, as described herein. The LRPP-fusion proteins can be used to affect the bioavailability of an LRPP substrate. The LRPP-fusion proteins may be useful therapeutically for the treatment of or prevention of damage caused by, for example, (i) aberrant modification or mutation of an LRPP, and (ii) aberrant post-translational modification of an LRPP. It is also conceivable that a fusion protein containing a normal or mutated LRPP, or a fragment thereof, may be capable of inhibiting normal LRPP activity in a subject.

[0149] Moreover, the LRPP-fusion proteins can be used as immunogens to produce anti-LRPP antibodies in a subject, to purify LRPP ligands and in screening assays to identify molecules which inhibit the interaction of an LRPP with an LRPP substrate.

[0150] LRPP-fusion proteins used as immunogens may comprise a non-LRPP immunogenic protein. In one embodiment, the immunogenic protein is capable of eliciting a recall response.

[0151] In another embodiment, an LRPP-fusion protein of the invention is produced by standard recombinant DNA techniques. For example, DNA fragments coding for the different polypeptide sequences are ligated together in-frame in accordance with conventional techniques, for example, by employing blunt-ended or stagger-ended termini for ligation, restriction enzyme digestion to provide for appropriate termini, filling-in of cohesive ends as appropriate, alkaline phosphatase treatment to avoid undesirable joining, and enzymatic ligation. In another embodiment, the fusion gene can be synthesized by conventional techniques including automated DNA synthesizers. Alternatively, PCR amplification of gene fragments can be carried out using anchor primers which give rise to complementary overhangs between two consecutive gene fragments which can subsequently be annealed and reamplified to generate a chimeric gene sequence. Moreover, many expression vectors are commercially available that already encode a fusion moiety (e.g., a GST polypeptide). An LRG-related polynucleotide can be cloned into such an expression vector such that the fusion moiety is linked in-frame to the LRG-related polypeptide.

[0152] A signal sequence can be used to facilitate secretion and isolation of the secreted protein or other proteins of interest. Signal sequences are typically characterized by a core of hydrophobic amino acids which are generally cleaved from the mature protein during secretion in one or more cleavage events. Such signal peptides contain processing sites that allow cleavage of the signal sequence from the mature proteins as they pass through the secretory pathway. Thus, the invention pertains to the described polypeptides having a signal sequence, as well as to polypeptides from which the signal sequence has been proteolytically cleaved (i.e., the cleavage products). In one embodiment, a polynucleotide sequence encoding a signal sequence can be operably linked in an expression vector to a protein of interest, such as a protein which is ordinarily not secreted or is otherwise difficult to isolate. The signal sequence directs secretion of the protein, such as from a eukaryotic host into which the expression vector is transformed, and the signal sequence is subsequently or concurrently cleaved. The protein can then be readily purified from the extracellular medium by art recognized methods.

[0153] Alternatively, the signal sequence can be linked to the protein of interest using a sequence which facilitates purification, such as with a GST domain.

[0154] The present invention also pertains to variants of an LRPP which function as antagonists to the LRPP. In one embodiment, antagonists or agonists of LRPPs are used as therapeutic agents. For example, antagonists to an LRPP can decrease the activity of the LRPP and ameliorate SLE/LN in a subject wherein said LRPP is over-expressed. Variants of LRPPs can be generated by mutagenesis, e.g., discrete point mutation or truncation of an LRG.

[0155] In certain embodiments, an antagonist of an LRPP can inhibit one or more of the activities of the naturally occurring form of the LRPP by, for example, competitively modulating an activity of the LRPP. Thus, specific biological effects can be elicited by treatment with a variant of limited function.

[0156] Mutants of an LRPP which function as either LRPP agonists or as LRPP antagonists can be identified by screening combinatorial libraries of mutants. In certain embodiments, such variants may be used, for example, as a therapeutic protein of the invention. A variegated library of LRPP variants can be produced by, for example, enzymatically ligating a mixture of synthetic oligonucleotides into gene sequences such that a degenerate set of potential LRPP sequences is expressible as individual polypeptides, or alternatively, as a set of larger fusion proteins (e.g., for phage display) containing the set of LRPP sequences therein. There are a variety of methods which can be used to produce libraries of potential LRPP variants from a degenerate oligonucleotide sequence. Chemical synthesis of a degenerate gene sequence can be performed in an automatic DNA synthesizer, and the synthetic gene is then ligated into an appropriate expression vector. Use of a degenerate set of genes allows for the provision, in one mixture, of all of the sequences encoding the desired set of potential LRPP sequences. Methods for synthesizing degenerate oligonucleotides are known in the art.

[0157] In addition, libraries of fragments of a protein coding sequence corresponding to an LRG can be used to generate a variegated population of LRPP fragments for screening and subsequent selection of variants of an LRPP. In one embodiment, a library of coding sequence fragments can be generated by treating a double-stranded PCR fragment of an LRG coding sequence with a nuclease under conditions wherein nicking occurs only about once per molecule, denaturing the double-stranded DNA, renaturing the DNA to form double-stranded DNA which can include sense/antisense pairs from different nicked products, removing single-stranded portions from reformed duplexes by treatment with S1 nuclease, and ligating the resulting fragment library into an expression vector. By this method, an expression library can be derived which encodes N-terminal, C-terminal and internal fragments of various sizes of the LRPP.

[0158] Several techniques are known in the art for screening gene products of combinatorial libraries made by point mutations or truncation, and for screening cDNA libraries for gene products having a selected property. The most widely used techniques, which are amenable to high-throughput analysis, for screening large gene libraries typically include cloning the gene library into replicable expression vectors, transforming appropriate cells with the resulting library of vectors, and expressing the combinatorial genes under conditions in which detection of a desired activity facilitates isolation of the vector encoding the gene whose product was detected. Recursive ensemble mutagenesis (REM), a technique which enhances the frequency of functional mutants in the libraries, can be used in combination with the screening assays to identify LRPP variants (Delgrave et al., Protein Engineering, 6:327-331, 1993).

[0159] Portions of an LRPP or variants of an LRPP having less than about 100 amino acids, and generally less than about 50 amino acids, may also be generated by synthetic means, using techniques well-known to those of ordinary skill in the art. For example, such polypeptides may be synthesized using any of the commercially available solid-phase techniques, such as the Merrifield solid-phase synthesis method, where amino acids are sequentially added to a growing amino acid chain. Equipment for automated synthesis of polypeptides is commercially available from suppliers such as Perkin Elmer/Applied BioSystems Division (Foster City, Calif.), and may be operated according to the manufacturer's instructions.

[0160] Methods and compositions for screening for protein inhibitors or activators are known in the art (see U.S. Patent Nos. 4,980,281, 5,266,464, 5,688,635, and 5,877,007, which are incorporated herein by reference).

### Antibodies

[0161] In accordance with another aspect of the present invention, antibodies specific to an LRPP or its variants are prepared. In many embodiments, an antibody of the present invention can bind to an LRPP with a binding affinity of at least 10⁵, 10⁶, 10⁷ M⁻¹ or more. The antibodies can be monoclonal, polyclonal, chimeric, or humanized antibodies.

[0162] In another aspect, the invention provides methods of making an isolated hybridoma which produces an antibody useful for diagnosing a patient or animal with SLE/LN. In this method, an LRPP or its variant is isolated (e.g., by purification from a cell in which it is expressed or by transcription and translation of a polynucleotide encoding the protein in vivo or in vitro using known methods). A vertebrate, such as a mammal (e.g., a mouse, rabbit or sheep), can be immunized using the isolated polypeptide or polypeptide fragment. The vertebrate may optionally be immunized at least one additional time with the isolated polypeptide or polypeptide fragment, so that the vertebrate exhibits a robust immune response to the polypeptide or polypeptide fragment. Splenocytes are isolated from the immunized vertebrate and fused with an immortalized cell line to form hybridomas, using any of a variety of methods well-known in the art. Hybridomas formed in this manner are then screened using standard methods to identify one or more hybridomas which produce an antibody which specifically binds with the polypeptide or polypeptide fragment. The invention also includes hybridomas made by this method and antibodies made using such hybridomas.

[0163] An isolated LRPP, or a portion or fragment thereof, can be used as an immunogen to generate antibodies that bind the LRPP using standard techniques for polyclonal and monoclonal antibody preparation. A full-length LRPP can be used or, alternatively, the invention provides antigenic peptide fragments of the LRPP for use as immunogens. The antigenic peptide of an LRPP comprises at least 8 amino acid residues of an amino acid sequence encoded by an LRG, and encompasses an epitope of an LRPP such that an antibody raised against the peptide forms a specific immune complex with the LRPP. The antigenic peptide can include, without limitation, at least 8, 12, 16, 20 or more amino acid residues.

[0164] Immunogenic portions (epitopes) may generally be identified using well-known techniques. Such techniques include screening polypeptides for the ability to react with antigen-specific antibodies, antisera and/or T-cell lines or clones. Such antisera and antibodies may be prepared as described herein, and using well-known techniques. An epitope of an LRPP is a portion that reacts with such antisera and/or T-cells at a level that is not substantially less than the reactivity of the full length polypeptide (e.g., in an ELISA and/or T-cell reactivity assay). Such epitopes may react within such assays at a level that is similar to or greater than the reactivity of the full length polypeptide. Such screens may generally be performed using methods well-known to those of ordinary skill in the art. For example, a polypeptide may be immobilized on a solid support and contacted with patient sera to allow the binding of antibodies within the sera to the immobilized polypeptide. Unbound sera may then be removed and bound antibodies detected using, for example, ¹²⁵I-labeled Protein A.

[0165] Exemplary epitopes encompassed by the antigenic peptide are regions of an LRPP that are located on the surface of the polypeptide, e.g., hydrophilic regions, as well as regions with high antigenicity.

[0166] An LRPP immunogen typically is used to prepare antibodies by immunizing a suitable subject, (e.g., rabbit, goat, mouse or other mammal) with the immunogen. An appropriate immunogenic preparation can contain, for example, recombinantly expressed LRPP or a chemically synthesized LRPP. The preparation can further include an adjuvant, such as Freund's complete or incomplete adjuvant, or similar immunostimulatory agent. Immunization of a suitable subject with an immunogenic LRPP preparation induces a polyclonal anti-LRPP antibody response. Techniques for preparing, isolating and using antibodies are well-known in the art.

[0167] Accordingly, another aspect of the invention pertains to monoclonal or polyclonal anti-LRPP antibodies. Examples of immunologically active portions of immunoglobulin molecules include F(ab) and F(ab′)₂ fragments which can be generated by treating the antibody with an enzyme such as pepsin. The invention provides polyclonal and monoclonal antibodies that bind to an LRPP.

[0168] Polyclonal anti-LRPP antibodies can be prepared as described above by immunizing a suitable subject with an LRPP. The anti-LRPP antibody titer in the immunized subject can be monitored over time by standard techniques, such as with an enzyme linked immunosorbent assay (ELISA) using immobilized LRPP or a fragment of LRPP. If desired, the antibody molecules directed against LRPP can be isolated from the mammal (e.g., from the blood) and further purified by well-known techniques, such as protein A chromatography, to obtain the lgG fraction. At an appropriate time after immunization, e.g., when the anti-LRPP antibody titers are the highest, antibody-producing cells can be obtained from the subject and used to prepare monoclonal antibodies by standard techniques, such as the hybridoma technique, human B cell hybridoma technique, the EBV-hybridoma technique, or trioma techniques. The technology for producing monoclonal antibody hybridomas is well-known. Briefly, an immortal cell line (typically a myeloma) is fused to lymphocytes (typically splenocytes) from a mammal immunized with an LRPP immunogen as described above, and the culture supernatants of the resulting hybridoma cells are screened to identify a hybridoma producing a monoclonal antibody that binds to an LRPP.

[0169] Any of the many well-known protocols used for fusing lymphocytes and immortalized cell lines can be applied for the purpose of generating an anti-LRPP monoclonal antibody. Moreover, the ordinarily skilled worker will appreciate that there are many variations of such methods which also would be useful.

[0170] Alternative to preparing monoclonal antibody-secreting hybridomas, a monoclonal anti-LRPP antibody can be identified and isolated by screening a recombinant combinatorial immunoglobulin library (e.g., an antibody phase display library) with an LRPP to thereby isolate immunoglobulin library members that bind to the LRPP. Kits for generating and screening phage display libraries are commercially available (e.g., the Pharmacia Recombinant Phage Antibody System, Catalog No. 27-9400-01; and the Stratagene SurfZAP™ Phage Display Kit, Catalog No. 240612).

[0171] The anti-LRPP antibodies also include “single-chain Fv” or “scFv” antibody fragments. The scFv fragments comprise the V_{H} and V_{L} domains of an antibody, wherein these domains are present in a single polypeptide chain. Generally, the Fv polypeptide further comprises a polypeptide linker between the V_{H} and V_{L} domains which enables the scFv to form the desired structure for antigen binding.

[0172] Additionally, recombinant anti-LRPP antibodies, such as chimeric and humanized monoclonal antibodies, comprising both human and non-human portions, which can be made using standard recombinant DNA techniques, are within the scope of the invention. Such chimeric and humanized monoclonal antibodies can be produced by recombinant DNA techniques known in the art.

[0173] In one embodiment, humanized antibodies are used for therapeutic treatment of human subjects. Humanized forms of non-human (e.g., murine) antibodies are chimeric molecules of immunoglobulins, immunoglobulin chains or fragments thereof (such as Fv, Fab, Fab′, F(ab′)₂ or other antigen-binding subsequences of antibodies), which contain minimal sequence derived from non-human immunoglobulin. Humanized antibodies include human immunoglobulins (recipient antibody) in which residues forming a complementary determining region (CDR) of the recipient are replaced by residues from a CDR of a non-human species (donor antibody) such as mouse, rat or rabbit having the desired specificity, affinity and capacity. In some instances, Fv framework residues of the human immunoglobulin are replaced by corresponding non-human residues. Humanized antibodies may also comprise residues which are found neither in the recipient antibody nor in the imported CDR or framework sequences. In general, the humanized antibody will comprise substantially all of at least one, and typically two, variable domains, in which all or substantially all of the CDR regions correspond to those of a non-human immunoglobulin and all or substantially all of the constant regions being those of a human immunoglobulin consensus sequence. The humanized antibody may also comprise at least a portion of an immunoglobulin constant region (Fc), typically that of a human immunoglobulin.

[0174] Such humanized antibodies can be produced using transgenic mice which are incapable of expressing endogenous immunoglobulin heavy and light chain genes, but which can express human heavy and light chain genes. The transgenic mice are immunized in the normal fashion with a selected antigen, e.g., all or a portion of an LRPP. Monoclonal antibodies directed against the antigen can be obtained using conventional hybridoma technology. The human immunoglobulin transgenes harbored by the transgenic mice rearrange during B cell differentiation, and subsequently undergo class switching and somatic mutation. Thus, using such a technique, it is possible to produce therapeutically useful IgG, IgA and IgE antibodies.

[0175] Humanized antibodies which recognize a selected epitope can be generated using a technique referred to as “guided selection.” In this approach a selected non-human monoclonal antibody, e.g., a murine antibody, is used to guide the selection of a humanized antibody recognizing the same epitope.

[0176] In an embodiment, the antibodies to an LRPP are capable of reducing or eliminating the biological function of the LRPP. In one example, at least a 25% decrease in activity is achieved. In another embodiment, at least about 50%, 60%, 70%, 80%, 90%, or more decrease in activity is obtained.

[0177] An anti-LRPP antibody can be used to isolate the LRPP by standard techniques, such as affinity chromatography or immunoprecipitation. An anti-LRPP antibody can facilitate the purification of a natural LRPP from cells and of a recombinantly produced LRPP expressed in host cells. Moreover, an anti-LRPP antibody can be used to detect an LRPP (e.g., in a cellular lysate or cell supernatant on the cell surface) in order to evaluate the abundance and pattern of expression of the LRPP. Anti-LRPP antibodies can be used diagnostically to monitor protein levels in tissue as part of a clinical testing procedure to, for example, determine the efficacy of a given treatment regimen. Detection can be facilitated by directly or indirectly coupling the antibody to a detectable substance. Examples of detectable substances include various enzymes, prosthetic groups, fluorescent materials, luminescent materials, bioluminescent materials, and radioactive materials. Examples of suitable enzymes include horseradish peroxidase, alkaline phosphatase, galactosidase, or acetylcholinesterase; examples of suitable prosthetic group complexes include streptavidin/biotin and avidin/biotin; examples of suitable fluorescent materials include umbelliferone, fluorescein, fluorescein isothiocyanate, rhodamine, dichlorotriazinylamine fluorescein, dansyl chloride or phycoerythrin; an example of a luminescent material includes luminol; examples of bioluminescent materials include luciferase, luciferin, and aequorin; and examples of suitable radioactive material include ¹²⁵I, ¹³¹I, ³⁵S and 3H.

[0178] Anti-LRPP antibodies of the invention are also useful for targeting a therapeutic to a cell or tissue comprising the antigen of the anti-LRPP antibody. For example, a therapeutic such as a small molecule can be linked to the anti-LRPP antibody in order to target the therapeutic to the cell or tissue comprising the LRPP antigen.

[0179] A therapeutic agent may be coupled (e.g., covalently bonded) to a suitable monoclonal antibody either directly or indirectly (e.g., via a linker group). A direct reaction between an agent and an antibody is possible when each possesses a substituent capable of reacting with the other. For example, a nucleophilic group, such as an amino or sulfbydryl group, on one may be capable of reacting with a carbonyl-containing group, such as an anhydride or an acid halide, or with an alkyl group containing a good leaving group (e.g., a halide) on the other.

[0180] Alternatively, it may be desirable to couple a therapeutic agent and an antibody via a linker group. A linker group can function as a spacer to distance an antibody from an agent in order to avoid interference with binding capabilities. A linker group can also serve to increase the chemical reactivity of a substituent on an agent or an antibody, and thus increase the coupling efficiency. An increase in chemical reactivity may also facilitate the use of agents, or functional groups on agents, which otherwise would not be possible.

[0181] It will be evident to those skilled in the art that a variety of bifunctional or polyfunctional reagents, both homo- and hetero-functional (such as those described in the catalog of the Pierce Chemical Co., Rockford, Ill.), may be employed as the linker group. Coupling may be effected, for example, through amino groups, carboxyl groups, sulfhydryl groups or oxidized carbohydrate residues.

[0182] Where a therapeutic agent is more potent when free from the antibody portion of the immunoconjugates of the present invention, it may be desirable to use a linker group which is cleavable during or upon internalization into a cell. A number of different cleavable linker groups have been described. The mechanisms for the intracellular release of an agent from these linker groups include cleavage by reduction of a disulfide bond (e.g., U.S. Pat. No. 4,489,710, to Spitler), by irradiation of a photolabile bond (e.g., U.S. Pat. No. 4,625,014, to Senter el al.), by hydrolysis of derivatized amino acid side chains (e.g., U.S. Pat. No. 4,638,045, to Kohn et al.), by serum complement-mediated hydrolysis (e.g., U.S. Pat. No. 4,671,958, to Rodwell et al.), and acid-catalyzed hydrolysis (e.g., U.S. Pat. No. 4,569,789, to Blattler el al.).

[0183] It may be desirable to couple more than one agent to an antibody. In one embodiment, multiple molecules of an agent are coupled to one antibody molecule. In another embodiment, more than one type of agent may be coupled to one antibody. Regardless of the particular embodiment, immunoconjugates with more than one agent may be prepared in a variety of ways. For example, more than one agent may be coupled directly to an antibody molecule, or linkers that provide multiple sites for attachment can be used.

### Vectors

[0184] Another aspect of the invention pertains to vectors containing polynucleotides encoding LRPPs or portions thereof. Vectors can be plasmids or viral vectors.

[0185] The expression vectors of the invention can be designed for expression of LRPPs in prokaryotic or eukaryotic cells. For example, LRPPs can be expressed in bacterial cells such as E. coli, insect cells (using baculovirus expression vectors), yeast cells, or mammalian cells. In certain embodiments, such protein may be used, for example, as a therapeutic protein of the invention. Alternatively, the expression vector can be transcribed and translated in vitro, for example using T7 promoter regulatory sequences and T7 polymerase.

[0186] In another embodiment, mammalian expression vector including tissue-specific regulatory elements are used to express the polynucleotides of interest. Tissue-specific regulatory elements are known in the art and may include epithelial cell-specific promoters. Other non-limiting examples of suitable tissue-specific promoters include the liver-specific albumin promoter, lymphoid-specific promoters, promoters of T cell receptors and immunoglobulins, neuron-specific promoters (e.g., the neurofilament promoter), pancreas-specific promoters, and mammary gland-specific promoters (e.g., milk whey promoter). Developmentally-regulated promoters are also encompassed, for example the α-fetoprotein promoter.

[0187] The LRGs identified in the present invention can be used for therapeutic purposes. For example, antisense constructs of the LRGs can be delivered therapeutically to SLE/LN cells. The goal of such therapy is to retard the growth rate of the SLE/LN-affected cells. Expression of the sense molecules and their translation products or expression of the antisense mRNA molecules has the effect of inhibiting the growth rate of SLE/LN-affected cells.

[0188] The invention also provides a recombinant expression vector comprising a polynucleotide encoding a LRPP cloned into the expression vector in an antisense orientation. That is, the DNA molecule is operatively linked to a regulatory sequence in a manner which allows for expression (by transcription of the DNA molecule) of an RNA molecule which is antisense to mRNA corresponding to an LRG of the invention. Regulatory sequences operatively linked to a polynucleotide cloned in the antisense orientation can be chosen to direct the continuous expression of the antisense RNA molecule in a variety of cell types. For instance viral promoters or enhancers, or regulatory sequences can be chosen to direct constitutive, tissue specific or cell type specific expression of antisense RNA. The antisense expression vector can be in the form of a recombinant plasmid, phagemid or attenuated virus in which antisense polynucleotides are produced under the control of a high efficiency regulatory region. The activity of the promoter/enhancer can be determined by the cell type into which the vector is introduced.

[0189] The invention further provides gene delivery vehicles for delivery of polynucleotides to cells, tissues, or a mammal for expression. For example, a polynucleotide sequence of the invention can be administered either locally or systemically in a gene delivery vehicle. These constructs can utilize viral or non-viral vector approaches in in vivo or ex vivo modality. Expression of such coding sequence can be induced using endogenous mammalian or heterologous promoters. Expression of the coding sequence in vivo can be either constituted or regulated. The invention includes gene delivery vehicles capable of expressing the contemplated polynucleotides. The gene delivery vehicle can be, for example, a viral vector, such as a retroviral, lentiviral, adenoviral, adeno-associated viral (AAV), herpes viral, or alphavirus vector. The viral vector can also be an astrovirus, coronavirus, orthomyxovirus, papovavirus, paramyxovirus, parvovirus, picornavirus, poxvirus, or togavirus viral vector.

[0190] Delivery of the gene therapy constructs of this invention into cells is not limited to the above mentioned viral vectors. Other delivery methods and media may be employed such as, for example, nucleic acid expression vectors, polycationic condensed DNA linked or unlinked to killed adenovirus alone, ligand linked DNA, liposome-DNA complex, eukaryotic cell delivery vehicles cells, deposition of photopolymerized hydrogel materials, handheld gene transfer particle gun, ionizing radiation, nucleic charge neutralization or fusion with cell membranes. Particle mediated gene transfer may be employed. Briefly, the sequence can be inserted into conventional vectors that contain conventional control sequences for high level expression, and then be incubated with synthetic gene transfer molecules such as polymeric DNA-binding cations like polylysine, protamine, and albumin, linked to cell targeting ligands such as asialoorosomucoid, insulin, galactose, lactose or transferrin. Naked DNA may also be employed. Uptake efficiency may be improved using biodegradable latex beads. DNA coated latex beads are efficiently transported into cells after endocytosis initiation by the beads. The method may be improved further by treatment of the beads to increase hydrophobicity and thereby facilitate disruption of the endosome and release of the DNA into the cytoplasm.

[0191] Another aspect of the invention pertains to the expression of LRGs using a regulatable expression system. These systems include, but are not limited to, the Tet-on/off system, the Ecdysone system, the Progesterone-system, and the Rapamycin-system.

[0192] Another aspect of the invention pertains to the use of host cells which are transformed, transfected, or transduced with vectors encoding or comprising LRGs or portions thereof. The host cells can be prokaryotic or eukaryotic cells. These host cells can be employed to express any desired LRPP.

### Detection Methods

[0193] As discussed earlier, expression level of LRG may be used as a marker for SLE/LN. Detection and measurement of the relative amount of an LRG product (polynucleotides or polypeptides) can be by any method known in the art.

[0194] Typical methodologies for detection of a transcribed polynucleotide include extraction of RNA from a cell or tissue sample, followed by hybridization of a labeled probe to the extracted RNA and detection of the labeled probe (e.g., Northern blotting, or nucleic acid array).

[0195] Typical methodologies for peptide detection include protein extraction from a cell or tissue sample, followed by binding of an antibody specific for the target protein to the protein sample, and detection of the antibody. For example, detection of an LRPP may be accomplished using an anti-LRPP polyclonal antibody. Antibodies are generally detected by the use of a labeled secondary antibody. The label can be a radioisotope, a fluorescent compound, an enzyme, an enzyme co-factor, or ligand. Such methods are well understood in the art.

[0196] In certain embodiments, the LRG itself may serve as a marker for SLE/LN. For example, an increase or decrease of genomic copies of an LRG, such as by duplication or deletion of the gene, may be correlated with SLE/LN.

[0197] Detection of specific polynucleotide molecules may also be assessed by gel electrophoresis, column chromatography, or direct sequencing, quantitative PCR, RT-PCR, nested-PCR, or other techniques known in the art.

[0198] Detection of the presence or number of copies of all or a part of an LRG may be performed using any method known in the art. In one embodiment, Southern analysis is employed to assess the presence and/or quantity of the genomic copies of the LRG. Other useful methods for DNA detection and/or quantification include, but are not limited to, direct sequencing, gel electrophoresis, column chromatography, quantitative PCR, or other means as appreciated by those skilled in the art.

### Screening Methods

[0199] The invention also provides methods (such as screening assays) for identifying modulators, such as candidate or test compounds or agents comprising therapeutic moieties (e.g., peptides, peptidomimetics, peptoids, polynucleotides, small molecules or drugs) which can (a) bind to an LRPP, (b) have a modulatory (e.g., stimulatory or inhibitory) effect on the activity of an LRPP, .(c) have a modulatory effect on the interactions of an LRPP with one or more of its natural substrates (e.g., peptides, proteins, hormones, co-factors, or polynucleotides), or (d) have a modulatory effect on the expression of an LRG. Such assays typically comprise a reaction between an LRPP and one or more assay components. The other components may be either the test compound itself, or a combination of test compound and a binding partner of an LRPP.

[0200] The test compounds of the present invention are generally inorganic molecules, small organic molecules, and biomolecules. Biomolecules include, but are not limited to, polypeptides, polynucleotides, polysaccharides, as well as any naturally-occurring or synthetic organic compounds that have a bioactivity in mammals. In one embodiment the test compound is a small organic molecule. In another embodiment, the test compound is a biomolecule.

[0201] The test compounds of the present invention may be obtained from any available source, including systematic libraries of natural and/or synthetic compounds. Test compounds may also be obtained by any of the numerous approaches in combinatorial library methods known in the art, including: biological libraries; peptoid libraries (libraries of molecules having the functionalities of peptides, but with a novel, non-peptide backbone which are resistant to enzymatic degradation but which nevertheless remain bioactive; see, e.g., Zuckermann et al., J. Med. Chem., 37: 2678-85, 1994); spatially addressable parallel solid phase or solution phase libraries; synthetic library methods requiring deconvolution the ‘one-bead one-compound’ library method; and synthetic library methods using affinity chromatography selection. The biological library and peptoid library approaches are limited to peptide libraries, while the other four approaches are applicable to peptide, non-peptide oligomer or small molecule libraries of compounds (Lam, Anticancer Drug Des., 12:145, 1997).

[0202] As used herein, the term “binding partner” refers to a bioactive agent which serves as either a substrate for an LRPP, or alternatively, as a ligand having binding affinity to an LRPP. As mentioned above, the bioactive agent may be any of a variety of naturally-occurring or synthetic compounds proteins, peptides, polysaccharides, nucleotides or polynucleotides.

### Screening for Inhibitors of LRPPs

[0203] The invention provides methods of screening test compounds for inhibitors of an LRPP, and of screening for the pharmaceutical compositions comprising the test compounds. The method of screening comprises obtaining samples from subjects diagnosed with or suspected of having SLE/LN, contacting each separate aliquot of the samples with one of a plurality of test compounds, and comparing the expression of LRGs in each of the aliquots to determine whether any of the test compounds provides a substantially decreased level of expression or activity of LRGs relative to samples with other test compounds or relative to an untreated sample or control sample. In addition, methods of screening may be devised by combining a test compound with a protein and thereby determining the effect of the test compound on the protein.

[0204] In addition, the invention is further directed to a method of screening for test compounds capable of modulating the binding of an LRPP to a binding partner, by combining the test compound, LRPP, and binding partner together and determining whether binding of the binding partner and the LRPP occurs. The test compound may be either small molecules or a bioactive agent. As discussed below, test compounds may be provided from a variety of libraries well-known in the art.

[0205] Inhibitors of LRG expression, activity or binding ability are useful as therapeutic compositions of the invention. Such inhibitors may be formulated as pharmaceutical compositions, as described herein below. Such modulators may also be used in the methods of the invention, for example, to diagnose, treat, or prognose SLE/LN.

### High-Throughout Screening Assays

[0206] The invention provides methods of conducting high-throughput screening for test compounds capable of inhibiting the activity or expression of LRGs. In one embodiment, the method of high-throughput screening involves combining test compounds and an LRPP and detecting the effect of the test compound on the LRPP. Functional assays such as cytosensor microphysiometer, calcium flux assays such as FLIPR® (Molecular Devices Corp, Sunnyvale, Calif.), or the TUNEL assay may be employed to measure cellular activity, as discussed below.

[0207] A variety of high-throughput functional assays well-known in the art may be used in combination to screen and/or study the reactivity of different types of activating test compounds. Since the coupling system is often difficult to predict, a number of assays may need to be configured to detect a wide range of coupling mechanisms. A variety of fluorescence-based techniques are well-known in the art and are capable of high-throughput and ultra-high throughput screening for activity, including but not limited to BRET® or FRET® (both by Packard instrument Co., Meriden, Conn.). The ability to screen a large volume and a variety of test compounds with great sensitivity permits for analysis of the therapeutic targets of the invention to further provide potential inhibitors of SLE/LN. The BIACORE® system may also be manipulated to detect binding of test compounds with individual components of the therapeutic target.

[0208] By combining test compounds with an LRPP and determining the binding activity between them, diagnostic analysis can be performed to elucidate the coupling systems. Generic assays using a cytosensor microphysiometer may also be used to measure metabolic activation, while changes in calcium mobilization can be detected by using the fluorescence—based techniques such as FLPR® (Molecular Devices Corp, Sunnyvale, Calif.). In addition, the presence of apoptotic cells may be determined by the TUNEL assay, which utilizes flow cytometry to detect free 3-OH termini resulting from cleavage of genomic DNA during apoptosis. As mentioned above, a variety of functional assays well-known in the art may be used in combination to screen and/or study the reactivity of different types of activating test compounds. In one embodiment, the high-throughput screening assay of the present invention utilizes label-free plasmon resonance technology as provided by the BIACORE® systems (Biacore International AB, Uppsala, Sweden). Plasmon free resonance occurs when surface plasmon waves are excited at a metal/liquid interface. By reflecting directed light from the surface as a result of contact with a sample, the surface plasmon resonance causes a change in the refractive index at the surface layer. The refractive index change for a given change of mass concentration at the surface layer is similar for many bioactive agents (including proteins, peptides, lipids and polynucleotides), and since the BIACORE® sensor surface can be functionalized to bind a variety of these bioactive agents, detection of a wide selection of test compounds can thus be accomplished.

[0209] Therefore, the invention provides for high-throughput screening of test compounds for the ability to inhibit an activity of an LRPP, by combining the test compounds and the LRPP in high-throughput assays such as BIACORE®, or in fluorescence-based assays such as BRET®. In addition, high-throughput assays may be utilized to identify specific factors which bind to an LRPP, or alternatively, to identify test compounds which prevent binding of an LRPP to the binding partner. Moreover, the high-throughput screening assays may be modified to determine whether test compounds can bind to either an LRPP or to a binding partner of the LRPP.

### Detection of Genetic AIterations

[0210] The methods of the invention can also be used to detect genetic alterations in an LRG, thereby determining if a subject with the altered gene is at risk for damage characterized by aberrant regulation in LRG activity or polynucleotide expression. In one embodiments, the methods include detecting, in a sample of cells from the subject, the presence or absence of a genetic alteration characterized by at least one alteration affecting the integrity of an LRG, or the aberrant expression of the LRG. For example, such genetic alterations can be detected by ascertaining the existence of at least one of the following: (i) deletion of one on more nucleotides from an LRG; (ii) addition of one or more nucleotides to an LRG; (iii) substitution of one or more nucleotides of an LRG; (iv) a chromosomal rearrangement of an LRG; (v) alteration in the level of a messenger RNA transcript of an LRG; (vi) aberrant modification of an LRG, such as of the methylation pattern of the genomic DNA; (vii) the presence of a non-wild-type splicing pattern of a messenger RNA transcript of an LRG; (viii) non-wild-type level LRG; (ix) allelic loss of an LRG, and (x) inappropriate post-translational modification of LRG products. As described herein, there are a large number of assays known in the art, which can be used for detecting alterations in an LRG. An example of a biological sample is a blood sample isolated by conventional means from a subject.

[0211] In certain embodiments, detection of the alteration involves the use of a probe/primer in a polymerase chain reaction (PCR), such as anchor PCR or RACE PCR, or, alternatively, in a ligation chain reaction (LCR), the latter of which can be particularly useful for detecting point mutations in the LRG. This method can include the steps of collecting a sample of cells from a subject, isolating a polynucleotide (e.g., genomic, mRNA or both) from the cells of the sample, contacting the polynucleotide sample with one or more primers which specifically hybridize to an LRG under conditions such that hybridization and amplification of the LRG (if present) occurs, and detecting the presence or absence of an amplification product, or detecting the size of the amplification product and comparing the length to a control sample. It is understood that PCR and/or LCR may be desirable to use as a preliminary amplification step in conjunction with any of the techniques used for detecting mutations described herein.

[0212] Alternative amplification methods include: self-sustained sequence replication, transcriptional amplification system, Q-Beta Replicase, or any other polynucleotide amplification method, followed by the detection of the amplified molecules using techniques well-known to those of skill in the art. These detection schemes are especially useful for the detection of polynucleotide molecules if such molecules are present in very low numbers.

[0213] In an alternative embodiment, mutations in an LRG from a sample cell can be identified by alterations in restriction enzyme cleavage patterns. For example, samples and control DNA are isolated, amplified (optionally), digested with one or more restriction endonucleases, and fragment length sizes are determined by gel electrophoresis and compared. Differences in fragment length sizes between sample and control DNA indicate mutations in the sample DNA. Moreover, the use of sequence specific ribozymes can be used to score for the presence of specific mutations by development or loss of a ribozyme cleavage site.

[0214] In other embodiments, genetic mutations in an LRG can be identified by hybridizing sample and control polynucleotides, e.g., DNA or RNA, to high density arrays containing LRG cDNAs obtained from samples of cells. For example, the mutY enzyme of E. coli cleaves A at G/A mismatches and the thymidine DNA glycosylase from HeLa cells cleaves T at G/T mismatches. According to an exemplary embodiment, a probe based on an LRG sequence, e g, a wild-type LRG sequence, is hybridized to cDNA or other DNA product from a test cell(s) The duplex is treated with a DNA mismatch repair enzyme, and the cleavage products, if any, can be detected from electrophoresis protocols or the like. See, for example, U.S. Pat. No 5,459,039.

[0215] In other embodiments, alterations in electrophoretic mobility will be used to identify mutations in an LRG. For example, single strand conformation polymorphism (SSCP) may be used to detect differences in electrophoretic mobility between mutant and wild-type polynucleotides single-stranded DNA fragments of sample and control LRG polynucleotides will be denatured and allowed to renature. The secondary structure of single-stranded polynucleotides varies according to sequence. The resulting alteration in electrophoretic mobility enables the detection of even a single base change. The DNA fragments may be labeled or detected with labeled probes. The sensitivity of the assay may be enhanced by using RNA (rather than DNA) in which the secondary structure is more sensitive to a change in sequence. In one embodiment, the subject method utilizes heteroduplex analysis to separate double-stranded heteroduplex molecules on the basis of changes in electrophoretic mobility (Keen el al., Trends Genet., 75, 1991).

[0216] In yet another embodiment the movement of mutant or wild-type fragments in polyacrylamide gels containing a gradient of denaturant is assayed using denaturing gradient gel electrophoresis (DGGE). When DGGE is used as the method of analysis, DNA will be modified to insure that it does not completely denature, for example, by adding a GC clamp of approximately 40 bp of high-melting GC-rich DNA by PCR. In a further embodiment, a temperature gradient is used in place of a denaturing gradient to identify differences in the mobility of control and sample DNA (Rosenbaum and Reissner, Biophys. Chem., 265 12753, 1987).

[0217] Examples of other techniques for detecting point mutations include, but are not limited to selective oligonucleotide hybridization, selective amplification, and selective primer extension. For example, oligonucleotide primers may be prepared in which the known mutation is placed centrally and then hybridized to target DNA under conditions which permit hybridization only if a perfect match is found (Saiki et al., Proc Natl. Acad. Sci. USA, 86:6230, hundreds or thousands of oligonucleotides probes. For example, genetic mutations in an LRG can be identified in two-dimensional arrays containing light generated DNA probes. Briefly, a first hybridization array of probes can be used to scan through long stretches of DNA in a sample and control to identify base changes between the sequences by making linear arrays of sequential overlapping probes. This step allows the identification of point mutations. This step is followed by a second hybridization array that allows the characterization of specific mutations by using smaller, specialized probe arrays complementary to all variants or mutations detected. Each mutation array is composed of parallel probe sets, one complementary to the wild-type gene and the other complementary to the mutant gene.

[0218] In yet another embodiment, any of a variety of sequencing reactions known in the art can be used to directly sequence the LRG and detect mutations by comparing the sequence of the sample LRG with the corresponding wild-type (control) sequence. It is also contemplated that any of a variety of automated sequencing procedures can be utilized when performing the diagnostic assays, including sequencing by mass spectrometry.

[0219] Other methods for detecting mutations in an LRG include methods in which protection from cleavage agents is used to detect mismatched bases in RNA/RNA or RNA/DNA heteroduplexes (Myers et al., Science, 230: 1242, 1985). In general, the art technique of “mismatch cleavage” starts by providing heteroduplexes by hybridizing (labeled) RNA or DNA containing the wild-type LRG sequence with potentially mutant RNA or DNA obtained from a tissue sample. The double-stranded duplexes are treated with an agent which cleaves single.-stranded regions of the duplex which will exist due to base pair mismatches between the control and sample strands. For instance, RNA/DNA duplexes can be treated with RNase and DNA/DNA hybrids treated with S1 nuclease to enzymatically digest the mismatched regions. In other embodiments, either DNA/DNA or RNA/DNA duplexes can be treated with hydroxylamine or osmium tetroxide and with piperidine in order to digest mismatched regions. After digestion of the mismatched regions, the resulting material is then separated by size on denaturing polyacrylamide gels to determine the site of mutation. In one embodiment, the control DNA or RNA can be labeled for detection.

[0220] In still another embodiment, the mismatch cleavage reaction employs one or more proteins that recognize mismatched base pairs in double-stranded DNA (so-called “DNA mismatch repair” enzymes) in defined systems for detecting and mapping point mutations in 1989). Such allele-specific oligonucleotides are hybridized to PCR amplified target or a number of different mutations when the oligonucleotides are attached to the hybridizing membrane and hybridized with labeled target DNA

[0221] Alternatively, allele-specific amplification technology which depends on selective PCR amplification may be used in conjunction with the instant invention Oligonucleotides used as primers for specific amplification may carry the mutation of interest in the center of the molecule (so that amplification depends on differential hybridization) or at the extreme 3′ end of one primer where, under appropriate conditions, mismatch can prevent or reduce polymerase extension. In addition, it may be desirable to introduce a novel restriction site in the region of the mutation to create cleavage-based detection It is anticipated that in certain embodiments amplification may also be performed using Taq ligase for amplification. In such cases, ligation will occur only if there is a perfect match at the 3′ end of the 5′ sequence making it possible to detect the presence of a known mutation at a specific site by looking for the presence or absence of amplification.

### Diagnostic and Prognostic Assays

[0222] The expression profile of an LRG or a panel of LRGs in a biological sample can be used for the diagnosis of SLE/LN. An exemplary diagnosis method includes the steps of obtaining .a biological sample from a test subject, contacting the biological sample with an agent capable of detecting an LRG product (e.g., an LRPP or an LRPN), determining expression level of the LRG product, and comparing the LRG expression in the biological sample to a reference level of LRG expression.

[0223] In one embodiment, the expression levels of one or more LRG products in a sample is compared to the expression levels in a normal sample, and an increased LRG expression/activity in the test sample indicates SLE/LN. A normal sample is a biological sample taken from a subject who is disease-free, who has not suffered from SLE/LN, or who is substantially free of SLE/LN. In another embodiment, the biological sample contains protein molecules from the test subject. Alternatively, the biological sample can contain mRNA molecules from the test subject. A biological sample from a subject can include a tissue sample, urine sample or blood sample. A tissue sample can be isolated by conventional means, e.g., a biopsy sample (such as a kidney or liver sample) from lupus patients. In many cases, the biological sample is a blood sample.

[0224] In one embodiment, the present invention provides a method for monitoring the effectiveness of treatment of a subject with an agent (e.g., an agonist, antagonist, peptidomimetic, protein, peptide, polynucleotide, small molecule, or other drug candidate identified by the screening assays described herein). The method includes the steps of (i) obtaining a pre-administration sample from a subject prior to administration of the agent; (ii) detecting the level of expression of an LRG in the pre-administration sample; (iii) obtaining a post-administration sample from the subject; (iv) detecting the level of expression of the LRG in the post-administration sample; and (v) comparing the level of expression of the LRG in the pre-administration sample with that in the post-administration sample. In order to optimize the treatment, the amount or frequency of administration of the agent can be adjusted. In many examples, reduction or elimination of abnormality in the expression of the LRG is indicative of the effectiveness of the agent.

[0225] In another embodiment, the effectiveness of an agent determined by a screening assay, as described herein to decrease LRG expression, protein levels, or down-regulate LRG protein activity, can be monitored in clinical trials of subjects exhibiting increased LRG expression, protein levels, or up-regulated LRG protein activity. In such clinical trials, the expression or activity of LRG can be used as a “read-out”, indicative of the physiological response of the cells to the agent. Accordingly, this response state may be determined before treatment and at various points during treatment of the individual with the agent.

[0226] The methods described herein may be performed, for example, by utilizing prepackaged diagnostic kits comprising at least one probe polynucleotide or antibody reagent described herein, which may be conveniently used, e.g., in clinical settings to diagnose or screen subjects for SLE/LN. Furthermore, any cell type or tissue in which an LRG is expressed may be utilized in the prognostic or diagnostic assays described herein.

[0227] In one embodiment, the prognostic or diagnostic assay analyzes the expression levels of 2, 3, 4, 5, 6, 7, or 8 LRGs selected from Table 1.

[0228] An exemplary agent for detecting an LRPP is an antibody capable of binding to the LRPP, such as an antibody with a detectable label. Antibodies can be polyclonal or monoclonal. An intact antibody, or a fragment thereof (e.g., Fab or F(ab′)₂) can be used. The term “labeled,” with regard to the probe or antibody, is intended to encompass direct labeling as well as indirect labeling (e.g., by reactivity with another reagent that is directly labeled). Examples of indirect labeling include detection of a primary antibody using a fluorescently-labeled secondary antibody and end-labeling of a DNA probe with biotin such that it can be detected with fluorescently-labeled streptavidin. The term “biological sample” is intended to include tissues, cells and biological fluids isolated from a subject, as well as tissues, cells and fluids present within a subject.

[0229] The detection method of the invention can be used to detect LRG products in a biological sample in vitro as well as in vivo. For example, in vitro techniques for detection of LRG mRNA include Northern hybridizations, in situ hybridizations, RT-PCR, Taqman analysis, and biochip technology as described herein. In vitro techniques for detection of LRG protein include enzyme linked immunosorbent assays (ELISAs), Western blots, immunoprecipitation, immunofluorescence and biochip technology. Furthermore, in vivo techniques for detection of LRG expression include introducing into a subject a labeled anti-LRPP antibody.

[0230] The diagnostic method described herein can also be utilized to identify subjects having or at risk of developing SLE/LN associated with aberrant LRG expression or activity.

[0231] Prognostic assays can be devised to determine whether a subject undergoing treatment for SLE/LN has a poor outlook for long term survival or disease progression. In one embodiment, prognosis can be determined shortly after diagnosis, e.g., within a few days. By establishing LRG expression profiles of different stages of SLE/LN, from onset to later stages, an expression pattern may emerge to correlate a particular expression profile to increased likelihood of a poor prognosis. The prognosis may then be used to devise a more aggressive treatment program and enhance the likelihood of long-term survival and well-being.

[0232] The diagnostic assays may be used to determine the progression or seventy of SLE/LN before and after treatment The diagnostic assays may also be used to monitor effects during clinical trials.

[0233] In another embodiment, the reference expression levels of LRGs, such as the expression levels derived from disease-free humans or known SLE/LN patients, are stored in a database and are readily retrievable.

[0234] In yet another embodiment, the comparison between expression profiles of various genes is performed electronically, such as using a computer system. The computer system comprises a processor coupled to a memory which stores data representing the expression profiles being compared. In one example, the memory is readable as well as rewritable. The expression data stored in the memory can be changed, retrieved or otherwise manipulated. The memory also stores one or more programs capable of causing the processor to compare the stored expression profiles For instance, the program may be able to execute a weighted voting algorithm. The processor can also be coupled to a polynucleotide array scanner and is capable of receiving signals from the scanner.

[0235] The gene expression analysis of this invention can be used to identify genes that are differentially expressed in samples isolated at different stages of the progression, development or treatment of SLE/LN Genes thus-identified are molecular markers for monitoring the progression, development or treatment of SLE/LN Genes thus-identified can also be used as surrogate markers for evaluating the efficacy of a treatment for SLE/LN.

[0236] A clinical challenge concerning SLE/LN is the highly variable response of patients to therapy. The basic concept of pharmacogenomics is to understand a patient's genotype in relation to available treatment options and then individualize the most appropriate option for the patient. Different classes of SLE/LN patients can be created based on their different responses to a given therapy. Differentially expressed genes in these classes can be identified using the global gene expression analysis. Genes thus-identified can serve as predictive markers for forecasting whether a particular patient will be more or less responsive to the given therapy. For patients predicted to have a favorable outcome for the therapy, efforts to minimized toxicity of the therapy may be considered, whereas for those predicted not to respond to the therapy, treatment with other therapies or experimental regimes.

### Methods of Treatment

[0237] The present invention provides for both prophylactic and therapeutic methods of treating a subject at risk for, susceptible to or diagnosed with SLE/LN. With regard to both prophylactic and therapeutic methods of treatment, such treatments may be specifically tailored or modified, based on knowledge obtained from the field of pharmacogenomics. “Pharmacogenomics,” as used herein, includes the application of genomics technologies such as gene sequencing, statistical genetics, and gene expression analysis to drugs in clinical development and on the market. More specifically, the term refers the study of how a subject's genes determine his or her response to a drug (e.g., a subject's “drug response phenotype” or “drug response genotype”). Thus, another aspect of the invention provides methods for tailoring an individual's prophylactic or therapeutic treatment with LRG modulators according to that individual's drug response. Pharmacogenomics allows a clinician or physician to target prophylactic or therapeutic treatments to subjects who will most benefit from the treatment and to avoid treatment of subjects who will experience toxic drug-related side effects.

### Prophylactic Methods

[0238] In one aspect, the invention provides a method for preventing in a subject SLE/LN associated with aberrant LRG expression or activity, by administering to the subject an agent which modulates LRG protein expression or activity.

[0239] Subjects at risk for SLE/LN which is caused or contributed to by aberrant LRG expression or activity can be identified by, for example, any or a combination of diagnostic or prognostic assays as described herein.

[0240] Administration of a prophylactic agent can occur prior to the manifestation of symptoms characteristic of the differential LRG protein expression, such that SLE/LN is prevented or, alternatively, delayed in its progression. Depending on the type of LRG aberrancy (e.g., typically a modulation outside the normal standard deviation), an LRG mutant protein, LRG protein antagonist agent, or LRG antisense polynucleotide, for example, can be used for treating the subject. The appropriate agent can be determined based on screening assays described herein.

### Therapeutic Methods

[0241] Another aspect of the invention pertains to methods of modulating LRG protein expression or activity for therapeutic purposes. Accordingly, in an exemplary embodiment, the modulatory method of the invention involves contacting a cell with an agent that inhibits LRG expression or one or more of the activities of an LRG protein associated with the cell. An agent that modulates LRG expression or protein activity can be an agent as described herein, such as a polynucleotide, a polypeptide, or a polysaccharide, a naturally-occurring target molecule of an LRG protein (e.g., an LRG protein substrate or receptor), an anti-LRPP antibody, an LRPP antagonist, a peptidomimetic of an LRG protein antagonist, or other small organic and inorganic molecule.

[0242] These modulatory methods can be performed in vivo (e.g., by administering the agent to a subject). As such, the present invention provides methods of treating an individual diagnosed with or at risk for SLE/LN characterized by aberrant expression or activity of an LRG. In. one embodiment, the method involves administering an agent (e.g., an agent identified by a screening assay described herein) or combination of agents that down-regulates LRG expression or activity. The agent may include a vector comprising a polynucleotide encoding an LRG inhibitor or an antisense sequence The agent may be an anti-LRPP antibody, a plurality of anti-LRPP antibodies or an anti-LRPP antibody conjugated to a therapeutic moiety. Treatment with the antibody may further be localized to the tissues or cells affected by SLE/LN.

### Pharmacogenomics

[0243] In conjunction with treatment for SLE/LN using an LRG modulator, pharmacogenomics analyses may be performed. Differences in metabolism of therapeutics can lead to severe toxicity or therapeutic failure by altering the relation between dose and blood concentration of the pharmacologically active drug. Thus, a physician or clinician may consider applying knowledge obtained in relevant pharmacogenomics studies in determining whether to administer an LRG modulator as well as tailoring the dosage and/or therapeutic regimen of treatment with an LRG modulator

[0244] Pharmacogenomics deals with clinically significant hereditary variations in the response to drugs due to altered drug disposition and abnormal action in affected persons In general, two types of pharmacogenetic conditions can be differentiated Genetic conditions transmitted as a single factor altering the way drugs act on the body (altered drug action) or genetic conditions transmitted as single factors altering the way the body acts on drugs (altered drug metabolism). These pharmacogenetic conditions can occur either as rare genetic defects or as naturally-occurring polymorphisms. For example, glucose-6-phosphate dehydrogenase deficiency (G6PD) is a common inherited enzymopathy in which the main clinical complication is hemolysis after ingestion of oxidant drugs (anti-malarials, sulfonamides, analgesics, nitrofurans) and consumption of fava beans.

[0245] One pharmacogenomics approach to identifying genes that predict drug response, known as “a genome-wide association,” relies primarily on a high-resolution map of the human genome consisting of already known gene-related sites (e.g., a “bi-allelic” gene marker map which consists of 60,000-100,000 polymorphic or variable sites on the human genome, each of which has two variants). Such a high-resolution genetic map can be compared to a map of the genome of each of a statistically substantial number of subjects taking part in a Phase II/III drug trial to identify genes associated with a particular observed drug response or side effect. Alternatively, such a high resolution map can be generated from a combination of some ten-million known single nucleotide polymorphisms (SNPs) in the human genome. As used herein, a “SNP” is a common alteration that occurs in a single nucleotide base in a stretch of DNA. For example, a SNP may occur once per every 1000 bases of DNA A SNP may be involved in a disease process. However, the vast majority of SNPs may not be disease associated. Given a genetic map based on the occurrence of such SNPs, individuals can be grouped into genetic categories depending on a particular pattern of SNPs in their individual genome. In such a manner, treatment regimens can be tailored to groups of genetically similar individuals, taking into account traits that may be common among such genetically similar individuals. Thus, mapping of the LRGs to SNP maps of LN patients may allow easier identification of these genes according to the genetic methods described herein.

[0246] Alternatively, a method termed the “candidate gene approach,” can be utilized to identify genes that predict drug response. According to this method, if a gene that encodes a drug target is known (e.g. an LRG), all common variants of that gene can be fairly easily identified in the population and it can be determined if having one version of the gene versus another is associated with a particular drug response.

[0247] As an illustrative embodiment, the activity of drug metabolizing enzymes is a major determinant of both the intensity and duration of drug action. The discovery of genetic polymorphisms of drug metabolizing enzymes (e.g., N-acetyltransferase 2 (NAT 2) and cytochrome P450 enzymes CYP2D6 and CYPZC19) has provided an explanation as to why some subjects do not obtain the expected drug effects or show exaggerated drug response and serious toxicity after taking the standard and safe dose of a drug. These polymorphisms are expressed in two phenotypes in the population, the extensive metabolizer and poor metabolizer. The prevalence of poor metabolizer phenotypes is different among different populations. For example, the gene coding for CYP2D6 is highly polymorphic and several mutations have been identified in poor metabolizers, which all lead to the absence of functional CYP2D6. Poor metabolizers of CYP2D6 and CYP2C19 quite frequently experience exaggerated drug response and side effects when they receive standard doses. If a metabolite is the active therapeutic moiety, poor metabolizers show no therapeutic response, as demonstrated for the analgesic effect of codeine mediated by its CYP2D6-formed metabolite morphine. The other extreme are the so called ultra-rapid metabolizers who do not respond to standard doses. Recently, the molecular basis of ultra-rapid metabolism has been identified to be due to CYP2D6 gene amplification.

[0248] Alternatively, a method termed the “gene expression profiling” can be utilized to identify genes that predict drug response. For example, the gene expression of an animal dosed with a drug (e.g., LRG expression in response to an LRG modulator ) can give an indication whether gene pathways related to toxicity have been turned on.

[0249] Information generated from more than one of the above pharmacogenomics approaches can be used to determine appropriate dosage and treatment regimens for prophylactic or therapeutic treatment an individual. This knowledge, when applied to dosing or drug selection, can avoid adverse reactions or therapeutic failure and thus enhance therapeutic or prophylactic efficiency when treating a subject with an LRG modulator.

### Pharmaceutical Compositions

[0250] The invention is further directed to pharmaceutical compositions comprising an LRG modulator and a pharmaceutically-acceptable carrier.

[0251] As used herein the language “pharmaceutically-acceptable carrier” is intended to include any and all solvents, solubilizers, fillers, stabilizers, binders, absorbents, bases, buffering agents, lubricants, controlled release vehicles, diluents, emulsifying agents, humectants, lubricants, dispersion media, coatings, antibacterial or antifungal agents, isotonic and absorption delaying agents, and the like, compatible with pharmaceutical administration. The use of such media and agents for pharmaceutically active substances is well-known in the art. Except insofar as any conventional media or agent is incompatible with the active compound, use thereof in the compositions is contemplated. Supplementary agents can also be incorporated into the compositions.

[0252] A pharmaceutical composition of the invention is formulated to be compatible with its intended route of administration. Examples of routes of administration include parenteral, e.g., intravenous, intradermal, subcutaneous, oral (e.g., inhalation), transdermal (topical), transmucosal, and rectal administration. Solutions or suspensions used for parenteral, intradermal, or subcutaneous application can include the following components: a sterile diluent such as water for injection, saline solution, fixed oils, polyethylene glycols, glycerine; propylene glycol or other synthetic solvents; antibacterial agents such as benzyl alcohol or methyl parabens; antioxidants such as ascorbic acid or sodium bisulfate; chelating agents such as ethylenediaminetetraacetic acid; buffers such as acetates, citrates or phosphates and agents for the adjustment of tonicity such as sodium chloride or dextrose. pH can be adjusted with acids or bases, such as hydrochloric acid or sodium hydroxide. The parenteral preparation can be enclosed in ampoules, disposable syringes or multiple dose vials made of glass or plastic.

[0253] Pharmaceutical compositions suitable for injectable use include sterile aqueous solutions (where water soluble) or dispersions and sterile powders for the extemporaneous preparation of sterile injectable solutions or dispersion. For intravenous administration, suitable carriers include physiological saline, bacteriostatic water, Cremophor EL™ (BASF, Parsippany, N.J.) or phosphate buffered saline (PBS). In all cases, the injectable composition should be sterile and should be fluid to the extent that easy syringability exists. It must be stable under the conditions of manufacture and storage and must be preserved against the contaminating action of microorganisms such as bacteria and fungi. The carrier can be a solvent or dispersion medium containing, for example, water, ethanol, polyol (for example, glycerol, propylene glycol, and liquid polyethylene glycol, and the like), and suitable mixtures thereof. The proper fluidity can be maintained, for example, by the use of a coating such as lecithin, by the maintenance of the requited particle size in the case of dispersion and by the use of surfactants. Prevention of the action of microorganisms can be achieved by various antibacterial and antifungal agents, for example, parabens, chlorobutanol, phenol, ascorbic acid, thimerosal, and the like. In many cases, it may be desirable to include isotonic agents, such as sodium chloride, sugars, polyalcohols (e.g., manitol, sorbitol, etc.) in the composition. Prolonged absorption of the injectable compositions can be brought about by including in the composition an agent which delays absorption, for example, aluminum monostearate and gelatin.

[0254] Sterile injectable solutions can be prepared by incorporating the active modulator (e.g., an anti-LRPP antibody, an LRG activity inhibitor, or a gene therapy vector expressing antisense nucleotide to an LRG) in the required amount in an appropriate solvent with one or a combination of ingredients enumerated above, as required, followed by filtered sterilization. Generally, dispersions are prepared by incorporating the active compound into a sterile vehicle which contains a basic dispersion medium and the required other ingredients from those enumerated above. In the case of sterile powders for the preparation of sterile injectable solutions, the exemplary methods of preparation are vacuum drying and freeze-drying which yields a powder of the active ingredient plus any additional desired ingredient from a previously sterile-filtered solution thereof.

[0255] Oral compositions generally include an inert diluent or an edible carrier. They can be enclosed in gelatin capsules or compressed into tablets. For the purpose of oral therapeutic administration, the active compound can be incorporated with excipients and used in the form of tablets, troches, or capsules. Oral compositions can also be prepared using a fluid carrier for use as a mouthwash, wherein the compound in the fluid carrier is applied orally and swished and expectorated or swallowed. Pharmaceutically compatible binding agents, and/or adjuvant materials can be included as part of the composition. The tablets, pills, capsules, troches and the like can contain all of the following ingredients, or compounds of a similar nature: a binder such as microcrystalline cellulose, gum tragacanth or gelatin, an excipient such as starch or lactose, a disintegrating agent such as alginic acid, Primogel, or corn starch, a lubricant such as magnesium stearate or Stertes; a glidant such as colloidal silicon dioxide; a sweetening agent such as sucrose or saccharin or a flavoring agent such as peppermint, methyl salicylate, or orange flavoring.

[0256] For administration by inhalation, the compounds are delivered in the form of an aerosol spray from a pressured container or dispenser which contains a suitable propellant, e.g., a gas such as carbon dioxide, or a nebulizer.

[0257] Systemic administration can also be by transmucosal or transdermal means. For transmucosal or transdermal administration, penetrants appropriate to the barrier to be permeated are used in the formulation. Such penetrants are generally known in the art, and include, for example, for transmucosal administration, detergents, bile salts, and fusidic acid derivatives. Transmucosal administration can be accomplished through the use of nasal sprays or suppositories. For transdermal administration, the bioactive compounds are formulated into ointments, salves, gels, or creams as generally known in the art.

[0258] The compounds can also be prepared in the form of suppositories (e.g., with conventional suppository bases such as cocoa butter and other glycerides) or retention enemas for rectal delivery.

[0259] In one embodiment, the therapeutic moieties, which may contain a bioactive compound, are prepared with carriers that will protect the compound against rapid elimination from the body, such as a controlled release formulation, including implants and microencapsulated delivery systems. Biodegradable, biocompatible polymers can be used, such as ethylene vinyl acetate, polyanhydrides, polyglycolic acid, collagen, polyorthoesters, and polylactic acid. Methods for preparation of such formulations will be apparent to those skilled in the art. The materials can also be obtained commercially from, e.g., Alza Corporation and Nova Pharmaceuticals, Inc Liposomal suspensions (including liposomes targeted to infected cells with monoclonal antibodies to viral antigens) can also be used as pharmaceutically-acceptable carriers. These can be prepared according to methods known to those skilled in the art, for example, as described in U.S. Pat. No. 4,522,811.

[0260] It is especially advantageous to formulate oral or parenteral compositions in dosage unit form for ease of administration and uniformity of dosage. Dosage unit form as used herein includes physically discrete units suited as unitary dosages for the subject to be treated, each unit contains a predetermined quantity of active compound calculated to produce the desired therapeutic effect in association with the required pharmaceutical carrier. The specification for the dosage unit forms of the invention are dictated by and directly dependent on the unique characteristics of the active compound and the particular therapeutic effect to be achieved, and the limitations inherent in the art of compounding such an active compound for the treatment of individuals.

[0261] Toxicity and therapeutic efficacy of such compounds can be determined by standard pharmaceutical procedures in cell cultures or experimental animals, e.g., by assessing the LD50 (the dose lethal to 50% of the population) and the ED50 (the dose therapeutically effective in 50% of the population). The dose ratio between toxic and therapeutic effects is the therapeutic index and it can be expressed as the ratio LD50/ED50. In many instance, compounds which exhibit large therapeutic indices are used. While compounds that exhibit toxic side effects may be used, care should be taken to design a delivery system that targets such compounds to the site of affected tissue in order to minimize potential damage to uninfected cells and, thereby, reduce side effects.

[0262] The data obtained from the cell culture assays and animal studies can be used in formulating a range of dosage for use in humans. In one embodiment, the dosage of such compounds lies within a range of circulating concentrations that includes the ED50 with little or no toxicity. The dosage may vary within this range depending upon the dosage form employed and the route of administration utilized. For any compound used in the method of the invention, the therapeutically effective dose can be estimated initially from cell culture assays. A dose may be formulated in animal models to achieve a circulating plasma concentration range that includes the IC50 (i.e., the concentration of the test compound which achieves a half-maximal inhibition of symptoms) as determined in cell culture. Such information can be used to more accurately determine useful doses in humans. Levels in plasma may be measured, for example, by high performance liquid chromatography.

[0263] The pharmaceutical compositions can be included in a container, pack, or dispenser together with instructions for administration.

### Kits

[0264] The invention also encompasses kits for detecting the presence of an LRG product in a biological sample. The detection can be quantitative or qualitative. The kit may include reagents for assessing the expression of an LRG at nucleotide or protein level. In one embodiment, the reagents include an antibody, or a fragment thereof, which can specifically bind an LRG protein. In another embodiment, the kits comprise a polynucleotide probe which can hybridize under stringent or highly stringent conditions to a transcript of an LRG, or the complement thereof. The kit may contain means for determining the amount of the LRG protein or mRNA in the sample, or means for comparing the amount of the LRG protein or mRNA in the sample with a control or standard. The reagents can be packaged in a suitable container. The kits can further include instructions for using the kit to detect LRG proteins or polynucleotides.

[0265] The invention further provides kits for assessing the suitability of each of a plurality of compounds for inhibiting SLE/LN in a subject. Such kits include a plurality of compounds to be tested, and a reagent for assessing the expression of an LRG (e.g., an antibody specific to the corresponding protein, or a probe or primer specific to the corresponding polynucleotide).

### EXAMPLES

### Example 1

### RNA Isolation and Hibridization to Oligonucleolide Arrays

[0266] MRL/MpJ-Fas^{lpr}, MRL/MpJ, B6/MRL-Fas^{lPr}, C57BL6/J, SJL/J, Balb/c, and DBA2/J mice were purchased from Jackson Laboratories (Bar Harbor, Me.). Five month old MRL/MpJ-Fas^{lPr} male mice were received as retired breeders. All other mice were obtained at 6 to 8 weeks of age and aged on site.

[0267] Kidneys from both male and female mice were collected and snap frozen for RNA isolation. One half of each kidney (a longitudinal section of the left kidney and a cross section of the right kidney) was harvested from each mouse in the study. Snap frozen mouse kidney tissue was homogenized using homogenizer suspended in RLT buffer plus 2-mercaptoethanol for 30 to 45 seconds. Total RNA was prepared using the Qiagen Midi Kit following the manufacturer's protocol. RNA was suspended in DEPC-treated water and quantified by OD 280.

[0268] Gene expression analysis was performed on individual kidney RNA samples harvested from the following mice C57BL/6 female mice at 8 weeks (n=3), 20 weeks (n=3) and 32 weeks (n=3); MRL/MpJ-Fas^{lPr} male at 8 weeks (n=3) and 20 weeks (n=2); MRL/MpJ-Fas^{lPr} female mice at 8 weeks (n=3), 16 weeks and 20 weeks (n=6 combined), MRL/MpJ female mice at 8 weeks (n=3) and 20 weeks (n=3), MRL/MpJ male mice at 8 (n=3) and 24 weeks (n=2), B6/MRL-Fas^{lPr} male at 8 weeks (n=3) and 20 weeks (n=3) B6/MRL-Fas^{lPr} female mice at 8 weeks (n=3) and 20 weeks (n=3). Thus, the total number of individual RNA samples subjected to gene expression analysis using the Affymetrix Genechip arrays was 46, twenty-one of which were harvested from lupus nephritis-free strains and the remainder from mice before, during or after disease onset.

[0269] cDNA was synthesized from 5 pg of total RNA from each individual kidney sample using the Superscript Kit (Life Technologies, Rockville, Md.). cDNA was purified using phenol: chloroform:isoamyl alcohol (25:24:1) with a Phage lock gel tube following the Phage lock protocol. Supernatant was collected and cleaned up using ethanol. The sample was resuspended in DEPC-treated water.

[0270] In vitro T7 polymerase driven transcription reactions for synthesis and biotin labeling of antisense cRNA, Qiagen RNAeasy spin column purification and cRNA fragmentation were carried out as previously described (Lockhart et al., Nature Biotechnology, 14:1675-80, 1996). Genechip hybridization mixtures containing 15 μg fragmented cRNA, 0.5 mg/ml acetylated BSA, and 0.1 mg/ml herring sperm DNA were prepared in 1X MES buffer in a total volume of 200 μl as per manufacturer's instructions. Reaction mixtures were hybridized for 16 hr at 45° C. to Affymetrix Mu11KsubA and Mu11KsubB oligonucleotide arrays. The hybridization mixtures were removed and the arrays were washed and stained with Streptavidin R-phycoerythrin (Molecular Probes, Eugene, Oreg.) using GeneChip Fluidics Station 400 and scanned with a Hewlett Packard GeneArray Scanner following manufactures instructions. Fluorescent data was collected and converted to gene specific difference average using MicroArray Suite software.

### Example 2

### Calculation of Gene Expression Frequency

[0271] An eleven member standard curve mixture, comprised of gene fragments derived from cloned bacterial and bacteriophage sequences, was spiked into each hybridization mixture at concentrations ranging from 0.5 pM to 150 pM representing RNA frequencies of approximately 3.3 to 1,000 parts per million (ppm). The biotinylated standard curve fragments were synthesized by T7-polymerase driven IVT reactions from plasmid-based templates. The spiked biotinylated RNA fragments serve both as an internal standard to assess chip sensitivity and as a standard curve to convert measured fluorescent difference averages from individual genes into RNA frequencies in ppm as described by Hill et al., Genome Biol., 2 Res 0055.1-0055.13 (2001). Gene expression frequencies from each individual mouse kidney were measured and the expression data subjected to statistical analysis. Array images were processed using the Affymetrix MicroArray Suite 4 software as follows. Raw array image data (.dat files) were reduced to probe feature-level intensity summaries (.cel files). Probe intensities for each message were then summarized using the Affymetrix Average Difference algorithm, and the Affymetrix Absolute Decision metric was computed (Absent, Present, or Marginal) for each gene. The Average Difference values were converted to estimates of absolute message abundance (in parts per million) by the scaled frequency method as previously described by Hill et al., supra. Briefly, Average Difference values were globally scaled to make the 2% trimmed mean average difference equal for all arrays. Standard curves from spiked cRNAs in each hybridization were then pooled from all arrays, and fitted by a linear calibration function passing through the origin. The scaled Average Difference values from all arrays were multiplied by the slope of this fitted calibration function to give initial frequency estimates. Frequencies smaller than the estimated sensitivity of each array were then adjusted to the average of the frequency and the sensitivity, in order to eliminate negative readouts. Due to the variation in sensitivity among probe sets for different messages, frequencies should be viewed as estimates, and inter-gene comparisons of frequencies should be interpreted cautiously.

### Example 3

### Selection of Genes in Analysis Set

[0272] Genes that were not called present by Affymetrix criteria (described below) in at least 50% of samples from at least one group were eliminated from the set of genes under analysis. The Affymetrix Microarray Suite examines the hybridization intensity data from one experiment (probe array) to calculate a set of absolute metrics. The metrics are used by a decision matrix to determine an Absolute Call for each transcript: Present (P), Absent (A), or Marginal (M). Similarly, in order to avoid conclusions dependent on the lower limits of the standard curves, any gene with average frequency not greater than 9 ppm in at least one group was eliminated from analysis. These operations resulted in a list of 5,285 tiled oligonucleotides representing the set of genes to be surveyed for MRL strain-dependent gene expression differences.

[0273] In order to identify gene expression patterns that may contributed to disease initiation, genes with significantly different expression levels in young, pre-symptomatic MRL/MpJ kidneys and kidneys from mice that do not develop LN were selected. Late stage disease samples (from MRL/MpJ-Fas^{lpr} mice four months of age or older) were omitted from this initial screen due to the numerous and profound changes in gene expression related to inflammation, kidney failure and fibrosis observed at this stage of disease. These changes may be consequences of the disease process, and would be expected to obscure differences identified between disease-free and early-stage disease samples.

[0274] FIG. 1 shows a flow chart describing an exemplary process for selecting LN-related genes that are over-expressed in the pre-symptomatic and early disease groups as compared to the LN-free group. A list of genes with significant expression frequency differences between lupus nephritis negative samples (C57BL/6, C57BL6/Fas^{lPr}) and young (pre-symptomatic) MRL/MpJ kidneys was compiled. Genes on the list had an average fold change (AFC) of greater than 1.5 and a p value of no less than 0.0005 (two-tailed student t-test, unequal variance). Genes that did not also show significant expression level differences (p≦0.0005, AFC>1.5) between the disease-free and early-stage disease samples (consisting of five 20-week or older MRL/MpJ and six 8-week or younger MRL/MpJ-Fas^{lpr} samples) were removed from the list. The step 103 was taken to eliminate genes that had relatively low expression levels. The gene expression patterns influenced by age, gender and Fas^{lPr} were then identified using the resulting gene analysis set of 5285 oligonucleotides in all kidney samples (steps 105-115). Genes with significantly higher expression in the pre-symptomatic group and the early disease group were identified (steps 117 and 119). Finally, only those genes that have significantly higher expression in both groups were selected for further analysis (step 121).

### Example 4

### Flagging of Potential Age, Gender and Fas^{lpr} Dependent Gene Expression Differences

[0275] Average fold change (AFC) was obtained by dividing the average frequency of one group by the average of the other group. To identify genes whose expression levels are influenced by gender, the AFC between male and female groups was calculated for each of the six groups of male and female mice listed above. All genes with fold change differences consistent between male and female mice in each group combination were flagged as demonstrating a possible gender influence. Genes with AFC>1.5 between 8 and 32 week old C57BL/6 (disease free) were flagged as “possibly age-influenced.” Genes with AFC>1.5 between C57BL/6 and C57BL/6-Fas^{lpr} were flagged as demonstrating a possible effect of the Fas^{lPr} mutation that did not depend on the disease-prone MRL genetic background. Genes identified through these processes as demonstrating possible gender, age and Fas^{lpr} influences on expression frequency were flagged but retained on the list of genes surveyed for influences related to the MRL genetic background.

[0276] Genes associated with age, gender, or Fas^{lpr} influences may still be lupus-related genes that are differentially expressed in lupus-affected or lupus-predisposed tissues relative to disease-free tissues. For diagnostic uses, the reference expression levels of these genes can be determined, for example, by using tissues isolated from reference subjects at the same or comparable age, gender, or Fas^{lPr} background.

### Example 5

### Examples of LRGs

[0277] Table 4 shows genes or qualifiers whose hybridization signals on Mu11KsubA or Mu11KsubB oligonucleotide arrays were substantially higher for the pre-symptomatic and early disease samples as compared to the disease-free samples. Accordingly, these genes and qualifiers represent LRGs that are over-expressed in pre-symptomatic and early disease tissues. “Fold change (pre-symptom v. disease free)” represents the ratio of an average frequency of a gene/qualifier in pre-symptomatic samples (e.g., 8-week or younger MRL/MpJ mice) over an average frequency of the same gene/qualifier in disease-free samples (e.g., C57BL/6 or B6/MRL-Fas^{lPr} mice). “Fold Change (early disease v. disease-free)” denotes the ratio of an average frequency of a gene/qualifier in early disease samples (e.g., 8-week or younger MRL/MpJ-Fas^{lpr} or 20-week or older MRL/MpJ mice) over an average frequency of the gene/qualifier in disease-free samples. “Fold Change (late disease v. disease-free)” represents the ratio of an average frequency of a gene/qualifier in late disease samples (e.g., 16-week or older MRL/MpJ-Fas^{lPr} mice) over an average frequency of the gene/qualifier in disease-free samples. The genes or qualifiers in Table 4 do not include those flagged as potentially demonstrating age, gender or Fas^{lPr} dependent expression patterns.

[0278] Table 4 also lists the human orthologs that corresponds to each mouse gene or qualifier. These human orthologs can be determined based on Affymetrix annotations, as appreciated by those skilled in the art. Affymetrix ortholog files contain cross-references between probe sets on two different Affymetrix arrays where the reference sequences on which the two probes are based have a significant amount of similarity. The similarity between the reference sequences is determined based on HomoloGene which is a resource of curated and calculated orthologs for genes represented by UniGene or by annotation of genomic sequences (see, for example, the website of the National Center for Biotechnology Information, Bethesda, Md.).

[0279] The human orthologs of mouse genes/qualifiers can also be determined by Blast searching human genome databases using the reference sequences or the oligonucleotide probe sequences of the respective qualifiers. The reference sequence or oligonucleotide probe sequences can be readily obtained from the manufacturer of oligonucleotide arrays (e.g., Affymetrix). Human genome databases suitable for Blast search include, but are not limited to, the Entrez nucleotide or genome database at the National Center for Biotechnology Information. Human genes (including putative genes or other transcribable genomic sequences) that significantly align with the reference sequence or the oligonucleotide probe sequence(s) can be identified as the potential human ortholog or homolog of the corresponding mouse qualifier.

[0280] For instance, Affymetrix annotation indicates that Mul lKsubA qualifier aa474703_s_at has a human homolog which encodes TIM 14 homolog of yeast TIM14 and is located at chromosome 3q27.2. Blast search of the Entrez human genome database using the reference sequence (tiling sequence) of aa474703_s_at shows that the reference sequence has about 88% sequence identity to LOC390473, a hypothetical gene supported by NM_{—}45261 on chromosome 14. In addition, a fragment of the reference sequence of aa474703_s_at exhibits about 85% sequence identity to a genomic sequence located between CEACAM4 (carcinoembryonic antigen-related cell adhesion molecule 4; LocusID 1089) and CEACAMP3 (carcinoembryonic antigen-related cell adhesion molecule pseudogene 3; LocuslD 1092).

[0281] The reference sequence of AA673499_rc_at is 99% identical at the nucleotide level to an AK011097 Mus musculus 13-day enriched liver cDNA:2510042P03:TPR domain-containing protein. The reference sequence of AA689927_s_at is 99% identical to a BC019497 Mus musculus cDNA, Riken cDNA 9430098E02 gene.

[0282] Table 5a shows examples of the qualifiers on the Mu11KsubA and Mu11KsubB oligonucleotide arrays that had significantly lower hybridization signals for the pre-symptomatic and early disease samples as compared to disease-free samples. These qualifiers represent genes that are under-expressed in pre-symptomatic and early disease samples relative to lupus-free samples. Genes represented by these qualifier are depicted in Table 5b.

[0283] The present invention also contemplates other transcribable human sequences that correspond to or are orthologous to mouse transcripts which are differentially expressed in pre-symptomatic and early-stage lupus-affected samples relative to lupus-free samples. In many instances, these transcribable human sequences have at least 75%, 80%, 85%, 90%, 95%, 98%, 99%, or more sequence identity to the respective mouse transcripts, or the complements thereof.

TABLE 4
Example LRGs that are Over-Expressed in Lupus-Affected Tissues Relative to Disease-Free Tissues

| | | Fold Change | P value | Fold Change | P value | Fold Change | P value |
|---|---|---|---|---|---|---|---|
| Mus musculus | Homo Sapiens | (pre-symptom v. | (pre-symptom v. | (early disease v. | (early disease v. | (late disease v. | (late disease v. |
| Gene/Qualifier | Ortholog | disease free) | disease-free) | disease-free) | disease-free) | disease-free) | disease free) |
| Frg1 | FRG1 | 1.73 | 5.0E−04 | 1.73 | 2.0E−09 | 4.5 | 2.9E−05 |
| Eprs | EPRS | 1.71 | 2.9E−09 | 2.00 | 7.3E−12 | 1.5 | 0.035 |
| Pfn1 | PFN1 | 2.06 | 2.0E−07 | 1.86 | 4.2E−06 | 1.7 | 2.5E−05 |
| Psmd8 | PSMD8 | 2.11 | 2.7E−05 | 1.81 | 1.1E−06 | 1.3 | 8.0E−03 |
| Axin1 | AXIN1 | 3.03 | 4.0E−04 | 2.76 | 5.2E−05 | 2.1 | 0.03 |
| Gnb1 | GNB1 | 1.95 | 1.5E−06 | 1.80 | 3.5E−06 | 1.9 | 5.6E−05 |
| Col4a3 | COL4A3 | 2.64 | 2.6E−04 | 2.22 | 7.5E−05 | 1.9 | 4.4E−08 |
| Hspe1 | HSPE1 | 2.02 | 1.8E−06 | 2.05 | 3.9E−06 | 1.9 | 1.1E−06 |
| Dci | DCI | 1.90 | 2.9E−04 | 2.18 | 3.5E−11 | 1.8 | 6.4E−07 |
| Rcvrn | RCV1 | 1.56 | 5.5E−08 | 1.56 | 2.9E−06 | 1.35 | 6.27E−06 |
| Sfrp1 | SFRP1 | 2.31 | 2.0E−04 | 2.47 | 2.3E−05 | 2.63 | 0.0002 |
| Apom | APOM | 1.79 | 3.1E−04 | 1.64 | 3.9E−04 | 2.19 | 0.068 |
| Kai1 | KAI1 | 2.38 | 5.2E−06 | 2.29 | 7.9E−09 | 2.23 | 3.86E−05 |
| AA689927_s_at | FLJ22709 | 4.28 | 8.6E−05 | 4.90 | 1.5E−06 | | |
| aa177915_at | KIAA0063 | 1.56 | 5.5E−08 | 1.56 | 2.9E−06 | | |
| aa220572_s_at | LOC57019 | 1.94 | 1.3E−06 | 1.88 | 9.3E−06 | | |
| aa474703_s_at | LocusID 131118 | 1.72 | 3.9E−05 | 1.72 | 1.5E−05 | | |
| aa545295_s_at | | 3.40 | 2.5E−04 | 3.37 | 5.0E−10 | | |
| Msa.16987.0_f_at | | 2.11 | 2.7E−05 | 1.81 | 1.1E−06 | | |
| Msa.1705.0_at | GABRB3 | 2.83 | 2.0E−04 | 2.10 | 9.1E−06 | | |
| AA673499_rc_{—} | FLJ30990 | 1.78 | 4.3E−06 | 2.07 | 1.2E−07 | | |
| at | | | | | | | |
| AA472783_at | FLJ38991 | 1.77 | 3.6E−05 | 1.88 | 4.6E−08 | | |
| aa709719_at | CLN6 | 1.60 | 1.8E−04 | 1.53 | 1.0E−07 | | |
| Msa.2399.0_at | DCI | 1.90 | 2.9E−04 | 2.18 | 3.5E−11 | | |

[0284] TABLE 5a
Example LRGs that are Under-Expressed in Lupus-Affected Tissues Relative to Disease-Free Tissues

| | Fold Change | P value | Fold Change | P value | Fold Change | P value |
|---|---|---|---|---|---|---|
| Mus musculus | (pre-symptom v. | (pre-symptom v. | (early disease v. | (early disease v. | (late disease v. | (late disease v. |
| Gene/Qualifier | disease free) | disease-free) | disease-free) | disease-free) | disease-free) | disease free) |
| aa466727_s_at | 0.524608501 | 5.98428E−05 | 0.602196 | 3.06576E−05 | 0.540268 | 6.26E−06 |
| aa562768_at | 0.197826087 | 1.33665E−05 | 0.213043 | 1.00476E−05 | 0.121739 | 2.26E−06 |
| aa198618_s_at | 0.589473684 | 1.37891E−06 | 0.65311 | 9.6954E−06 | 0.746053 | 0.000632 |
| aa407822_at | 0.56 | 1.70897E−09 | 0.687273 | 2.51731E−05 | 0.7525 | 0.000764 |
| aa209596_s_at | 0.648809524 | 9.6824E−07 | 0.685065 | 5.15678E−06 | 0.803571 | 0.030387 |
| aa177231_s_at | 0.65915805 | 1.22222E−06 | 0.734591 | 2.24587E−06 | 0.711503 | 4.82E−07 |
| aa250449_s_at | 0.450920245 | 1.36042E−07 | 0.63246 | 9.25536E−06 | 0.756902 | 0.010938 |
| aa607889_at | 0.519138756 | 1.56707E−08 | 0.520661 | 1.71446E−08 | 0.489833 | 3.64E−07 |
| aa289858_s_at | 0.306010929 | 3.2495E−07 | 0.52161 | 8.06798E−05 | 0.645492 | 0.003293 |
| aa408325_rc_s_at | 0.610694184 | 0.000146464 | 0.719939 | 7.50231E−05 | 0.669794 | 8.92E−07 |
| aa277107_s_at | 0.686478455 | 0.000286111 | 0.733284 | 0.000155321 | 0.70013 | 2.58E−05 |
| I42115_s_at | 0.498850575 | 4.96427E−05 | 0.697806 | 7.35745E−05 | 0.724138 | 0.006776 |
| AA237535_s_at | 0.637259503 | 1.98785E−10 | 0.757903 | 7.03074E−07 | 0.631922 | 9.03E−07 |
| AA184872_s_at | 0.15819209 | 4.03569E−14 | 0.399076 | 2.06655E−10 | 0.415254 | 2.24E−07 |
| u37720_f_at | 0.664853556 | 6.64826E−09 | 0.676569 | 7.16556E−08 | 0.724895 | 1.39E−06 |
| aa689125_at | 0.4 | 9.87353E−06 | 0.567273 | 3.08654E−10 | 0.585 | 6.64E−07 |
| aa476184_s_at | 0.324503311 | 4.81241E−11 | 0.59422 | 6.77277E−06 | 0.608444 | 0.002888 |
| aa183627_s_at | 0.554675119 | 1.16862E−09 | 0.559718 | 1.00171E−08 | 0.549128 | 4.48E−08 |
| aa261061_s_at | 0.431404073 | 3.83609E−18 | 0.392868 | 1.01689E−16 | 0.298232 | 4.61E−12 |
| m29881_f_at | 0.11691023 | 5.7402E−08 | 0.352723 | 8.06786E−06 | 2.498956 | 0.014719 |
| AA238219_f_at | 0.407692308 | 3.69198E−13 | 0.472028 | 1.91899E−13 | 0.3375 | 1.02E−14 |
| aa422527_s_at | 0.526483051 | 7.29044E−05 | 0.457049 | 2.2917E−10 | 0.372617 | 2.23E−09 |
| aa689125_g_at | 0.535294118 | 0.000351565 | 0.576471 | 1.43634E−09 | 0.617647 | 1.67E−07 |
| u73200_s_at | 0.616290019 | 2.26269E−05 | 0.636364 | 1.47399E−07 | 0.516596 | 4.74E−11 |
| aa172909_f_at | 0.488372093 | 6.85351E−05 | 0.394027 | 2.32423E−06 | 0.480741 | 5.33E−05 |
| aa408822_rc_s_at | 0.427419355 | 3.88878E−05 | 0.382698 | 4.15819E−09 | 0.33871 | 5.96E−09 |
| d16142_f_at | 0.752683305 | 8.21377E−08 | 0.736924 | 2.70685E−07 | 0.722019 | 0.000124 |
| aa396029_s_at | 0.483164983 | 2.48171E−06 | 0.662075 | 5.08906E−05 | 0.892677 | 0.333131 |
| U59761_s_at | 0.606613455 | 5.64009E−06 | 0.642169 | 7.17506E−09 | 0.667474 | 1.63E−07 |
| aa018016_s_at | 0.2 | 4.96946E−11 | 0.335065 | 1.0996E−09 | 0.364286 | 1.09E−08 |
| aa217493_s_at | 0.343558282 | 2.67279E−07 | 0.339654 | 1.08307E−13 | 0.305982 | 4.62E−11 |
| aa178464_at | 0.715555556 | 0.000404793 | 0.789091 | 0.000433418 | 0.758333 | 7E−05 |
| C77647_rc_at | 0.548192771 | 1.19943E−06 | 0.701533 | 0.000215447 | 0.806476 | 0.050446 |
| m65132_s_at | 0.527932961 | 0.000108643 | 0.725241 | 0.000119675 | 0.76257 | 0.020534 |
| aa120636_s_at | 0.07977208 | 7.85156E−14 | 0.212121 | 5.12728E−13 | 0.201923 | 4.02E−13 |
| I40632_s_at | 0.507246377 | 2.11906E−06 | 0.567194 | 1.82625E−05 | 0.54212 | 2.35E−05 |
| D00926_s_at | 0.713592233 | 0.000236701 | 0.695057 | 1.17067E−05 | 0.603155 | 3.69E−05 |
| aa407794_rc_at | 0.386206897 | 2.45573E−06 | 0.645141 | 5.19105E−05 | 0.57931 | 4.05E−05 |
| aa386606_s_at | 0.547546012 | 5.5361E−07 | 0.650028 | 0.000510386 | 0.539494 | 0.000246 |
| aa710868_at | 0.748091603 | 1.1092E−09 | 0.752949 | 8.44772E−10 | 0.915076 | 0.207197 |
| aa123450_at | 0.565868263 | 1.18718E−06 | 0.74687 | 8.08387E−06 | 0.696856 | 5.84E−05 |
| aa189345_s_at | 0.527108434 | 1.86796E−07 | 0.684283 | 3.3201E−06 | 0.640437 | 9.7E−06 |
| aa175784_s_at | 0.530848329 | 1.11316E−06 | 0.549661 | 6.95076E−09 | 0.695051 | 0.002339 |
| aa170668_s_at | 0.301886792 | 2.55131E−05 | 0.45283 | 0.000206136 | 2.363208 | 0.026526 |
| C78067_rc_at | 0.202312139 | 1.21507E−06 | 0.452444 | 0.000336565 | 0.470376 | 0.000633 |
| aa596794_s_at | 0.450542005 | 2.17246E−10 | 0.513489 | 2.41564E−10 | 0.716717 | 0.071892 |
| aa617621_s_at | 0.680119581 | 1.53675E−09 | 0.7819 | 3.32944E−05 | 0.702354 | 2.39E−07 |
| D50527_f_at | 0.765265923 | 1.58204E−05 | 0.576822 | 3.52814E−06 | 0.658979 | 0.018112 |
| d89076_s_at | 0.240740741 | 3.68613E−12 | 0.40404 | 3.32076E−10 | 0.458333 | 1.88E−07 |
| AF019249_s_at | 0.712962963 | 2.57805E−05 | 0.795455 | 0.000312917 | 1.75 | 0.004574 |
| aa409826_rc_s_at | 0.349493488 | 5.86047E−14 | 0.378503 | 1.01089E−14 | 0.547033 | 3.09E−06 |
| aa204482_s_at | 0.557971014 | 1.69973E−05 | 0.645586 | 6.48639E−08 | 0.98913 | 0.935523 |
| AA060336_at | 0.388888889 | 2.96378E−06 | 0.676136 | 0.000406196 | 0.674479 | 0.003876 |
| aa122805_s_at | 0.147887324 | 7.94241E−16 | 0.203585 | 3.4993E−16 | 0.221831 | 1.01E−15 |
| aa271181_s_at | 0.385 | 3.46746E−08 | 0.534545 | 1.72178E−07 | 0.55125 | 1.28E−06 |
| aa270341_s_at | 0.626315789 | 2.34606E−06 | 0.602871 | 5.23309E−07 | 0.643421 | 0.004666 |
| m59377_s_at | 0.581132075 | 0.000232737 | 0.698799 | 0.000172583 | 0.931132 | 0.618527 |
| aa271360_s_at | 0.69 | 3.6742E−06 | 0.696364 | 2.83724E−16 | 0.6825 | 3.92E−10 |
| af023258_s_at | 0.619856887 | 3.57198E−05 | 0.683038 | 0.000447116 | 0.74195 | 0.00223 |
| aa638759_at | 0.441919192 | 8.4675E−07 | 0.549587 | 5.89466E−07 | 0.662879 | 0.000242 |
| D78255_at | 0.485148515 | 1.80126E−07 | 0.661566 | 0.000267326 | 0.532797 | 4.37E−06 |
| aa028386_at | 0.502217295 | 5.9572E−11 | 0.560572 | 8.22179E−15 | 0.439856 | 1.56E−08 |
| aa271471_s_at | 0.720947631 | 6.74804E−06 | 0.775062 | 9.98855E−05 | 0.687344 | 3.06E−08 |
| aa222947_at | 0.158647141 | 5.16259E−14 | 0.197033 | 7.50847E−15 | 0.219665 | 3.03E−14 |
| aa574478_r_at | 0.267857143 | 8.67266E−10 | 0.457792 | 1.13311E−07 | 0.495536 | 7.01E−07 |
| AA276848_at | 0.66293279 | 0.000156602 | 0.563784 | 4.07868E−09 | 0.545316 | 0.000487 |
| aa414419_s_at | 0.398373984 | 1.54556E−09 | 0.698448 | 0.000403674 | 0.661585 | 0.000359 |
| aa198971_s_at | 0.176780077 | 9.27948E−18 | 0.196869 | 1.14858E−18 | 0.182304 | 3.24E−18 |
| aa066638_s_at | 0.737780041 | 6.75172E−07 | 0.704731 | 3.73292E−09 | 0.539969 | 2.8E−10 |
| aa212803_at | 0.454410307 | 5.74919E−05 | 0.399225 | 3.66647E−13 | 0.379832 | 6.34E−16 |
| U44731_s_at | 0.101694915 | 2.00846E−05 | 0.198767 | 7.9279E−05 | 0.661017 | 0.200896 |
| Msa.409.0_f_at | 0.599331104 | 0.00030862 | 0.57592 | 3.02652E−09 | 0.477592 | 4.08E−10 |
| x00246_f_at | 0.330525778 | 8.93599E−08 | 0.588612 | 0.000327942 | 2.130551 | 0.002183 |
| Msa.24975.0_s_at | 0.307017544 | 1.52793E−06 | 0.703349 | 0.000164249 | 0.667763 | 0.001387 |
| Msa.1292.0_at | 0.612662942 | 0.000309402 | 0.618588 | 9.80731E−05 | 0.518156 | 6.88E−07 |
| W08454_s_at | 0.094230769 | 4.11876E−08 | 0.337762 | 5.29233E−06 | 0.323077 | 3.8E−06 |
| X78709_s_at | 0.685527748 | 6.27352E−08 | 0.710456 | 2.0524E−06 | 0.556991 | 7.05E−09 |
| X54511_f_at | 0.068245125 | 1.09134E−06 | 0.202076 | 9.08382E−06 | 0.241295 | 1.82E−05 |
| w11020_g_at | 0.758426966 | 7.92627E−05 | 0.582227 | 9.49616E−09 | 0.526685 | 2.47E−07 |
| Msa.2906.0_f_at | 0.629766861 | 1.29541E−05 | 0.68988 | 0.000240768 | 0.679746 | 0.00028 |
| x75129_s_at | 0.301724138 | 9.85426E−12 | 0.352665 | 1.3525E−12 | 0.788793 | 0.16634 |
| Msa.6658.0_f_at | 0.609311741 | 1.02916E−06 | 0.564225 | 1.02385E−07 | 0.510121 | 3.52E−05 |
| Msa.34974.0_s_at | 0.281021898 | 3.09018E−08 | 0.543464 | 2.10048E−05 | 0.593978 | 0.000956 |
| Msa.22407.0_s_at | 0.392 | 4.1843E−09 | 0.672 | 1.36783E−06 | 0.63 | 5.21E−05 |
| Msa.35779.0_s_at | 0.653545545 | 1.25771E−05 | 0.646492 | 1.61599E−05 | 0.311106 | 1.75E−08 |
| Msa.4414.0_f_at | 0.47804878 | 2.37512E−07 | 0.577384 | 1.32659E−05 | 0.537805 | 8.57E−05 |
| Msa.3346.0_s_at | 0.706698565 | 2.37997E−06 | 0.728926 | 0.000134707 | 0.567703 | 6.66E−07 |
| w11020_at | 0.648876404 | 0.000111547 | 0.525536 | 1.33463E−06 | 0.626756 | 0.002596 |
| Msa.21579.0_s_at | 0.516666667 | 0.000240218 | 0.481818 | 3.22746E−08 | 0.40625 | 2.13E−08 |
| x04648_s_at | 0.720806794 | 1.7684E−05 | 0.741749 | 5.19421E−05 | 0.863854 | 0.097927 |
| w29651_s_at | 0.674390244 | 1.53487E−05 | 0.58204 | 2.93929E−08 | 0.428963 | 9.71E−11 |
| Msa.3906.0_f_at | 0.412921348 | 0.000280886 | 0.514811 | 0.000278601 | 1.150281 | 0.614585 |
| ET61037_f_at | 0.663553584 | 3.77121E−06 | 0.57344 | 2.00255E−07 | 0.626678 | 0.001914 |
| x16670_f_at | 0.582205029 | 0.000401018 | 0.498505 | 2.24608E−07 | 0.453578 | 6.05E−08 |
| Msa.34568.0_f_at | 0.750349162 | 0.000266617 | 0.654584 | 8.94769E−06 | 0.428946 | 6.33E−08 |
| Msa.19552.0_s_at | 0.087332054 | 6.85921E−05 | 0.073286 | 4.55039E−05 | 0.075576 | 4.68E−05 |
| x04120_f_at | 0.448887837 | 2.38112E−05 | 0.464398 | 2.6399E−06 | 0.475805 | 4.62E−06 |
| X95280_s_at | 0.551971326 | 2.14882E−06 | 0.670577 | 0.000241576 | 0.686828 | 0.008014 |
| x62772_f_at | 0.396907216 | 0.000328691 | 0.511715 | 6.96167E−06 | 0.568299 | 0.000114 |
| Z48043_s_at | 0.615879828 | 1.63436E−05 | 0.639095 | 3.10033E−05 | 0.585837 | 1.82E−05 |

[0285] TABLE 5b
Example LRGs that are Under-Expressed in Lupus-Affected Tissues
Relative to Disease-Free Tissues

| Mus musculus | |
|---|---|
| Gene/Qualifier | Gene Name |
| aa466727_s_at | A kinase (PRKA) anchor protein 1 |
| aa562768_at | glioblastoma amplified sequence |
| aa198618_s_at | Mus musculus |
| aa407822_at | RIKEN cDNA 5730494N06 gene |
| aa209596_s_at | translocase of inner mitochondrial membrane 13 homolog a (yeast) |
| aa177231_s_at | RIKEN cDNA 1700051C09 gene |
| aa250449_s_at | RIKEN cDNA 2310016E22 gene |
| aa607889_at | AKAP8 |
| aa289858_s_at | RIKEN cDNA C730049F20 gene |
| aa408325_rc_s_at | 2010300G19RIK |
| aa277107_s_at | sarcosine dehydrogenase |
| l42115_s_at | solute carrier family 1 |
| AA237535_s_at | propionyl Coenzyme A carboxylase |
| AA184872_s_at | RIKEN cDNA 1110023P21 gene |
| u37720_f_at | CDC42 |
| aa689125_at | ZFP277 |
| aa476184_s_at | RIKEN cDNA D530020C15 gene |
| aa183627_s_at | mt27g07.r1 Soares mouse 3NbMS Mus musculus cDNA clone |
| | 622332 5′ |
| aa261061_s_at | RIKEN cDNA 1810010A06 gene |
| m29881_f_at | H2-Q7 |
| AA238219_f_at | solute carrier family 2 (facilitated glucose transporter) |
| aa422527_s_at | RIKEN cDNA 5730591C18 gene |
| aa689125_g_at | ZFP277 |
| u73200_s_at | RHOIP3-PENDING |
| aa172909_f_at | ms20h07.r1 Stratagene mouse skin (#937313) Mus musculus cDNA |
| | clone 607549 5′ similar to gb:M10062 Mouse IgE-binding factor |
| | mRNA; complete cds (MOUSE); |
| aa408822_rc_s_at | EST03349 Mouse 7.5 dpc embryo ectoplacental cone cDNA library |
| | Mus musculus cDNA clone C0033H08 3′ |
| d16142_f_at | peroxiredoxin 1 |
| aa396029_s_at | signal transducer and activator of transcription 3 |
| U59761 _s_at | complete cds. |
| aa018016_s_at | mh45c07.r1 Soares mouse placenta 4NbMP13.5 14.5 Mus musculus |
| | cDNA clone 445452 5′ |
| aa217493_s_at | dynactin 6 |
| aa178464_at | RIKEN cDNA 2210408F11 gene |
| C77647_rc_at | C77647 |
| m65132_s_at | MUC1 |
| aa120636_s_at | serine/threonine kinase 25 (yeast) |
| l40632_s_at | ANK3 |
| D00926_s_at | Mouse mRNA for transcription factor S-II-releated protein |
| aa407794_rc_at | DNA segment |
| aa386606_s_at | CDK5 regulatory subunit associated protein 3 |
| aa710868_at | 4632419I22RIK |
| aa123450_at | RIKEN cDNA 4921505F14 gene |
| aa189345_s_at | caspase 9 |
| aa175784_s_at | viral hemorrhagic septicemia virus(VHSV) induced gene 1 |
| aa170668_s_at | Mus musculus diabetic nephropathy-related gene 1 mRNA |
| C78067_rc_at | BUB3 |
| aa596794_s_at | F2R |
| aa617621_s_at | 2410016C14RIK |
| D50527_f_at | UBC |
| d89076_s_at | TTR |
| AF019249_s_at | NMI |
| aa409826_rc_s_at | D4WSU27E |
| aa204482_s_at | CD97 antigen |
| AA060336_at | RIKEN cDNA 2900086B20 gene |
| aa122805_s_at | ARP3 actin-related protein 3 homolog (yeast) |
| aa271181_s_at | SnRNP assembly defective 1 homolog |
| aa270341 _s_at | hypothetical protein MGC30714 |
| m59377_s_at | TNFRSF1A |
| aa271360_s_at | RIKEN cDNA 1110031B06 gene |
| af023258_s_at | SLC27A1 |
| aa638759_at | AA536743 |
| D78255_at | RP9H |
| aa028386_at | ATP-binding cassette |
| aa271471_s_at | ATP citrate lyase |
| aa222947_at | SLC15A2 |
| aa574478_r_at | 5730414C17RIK |
| AA276848_at | chloride channel 4-2 |
| aa414419_s_at | DNA segment |
| aa198971_s_at | solute carrier family 25 (mitochondrial carrier; peroxisomal |
| | membrane protein) |
| aa066638_s_at | RIKEN cDNA 2310005O14 gene |
| aa212803_at | vanin 1 |
| U44731_s_at | GBP3 |
| Msa.409.0_f_at | complete cds |
| x00246_f_at | histocompatibility 2 |
| Msa.24975.0_s_at | STK25 |
| Msa.1292.0_at | WT1 |
| W08454_s_at | TM4SF8-PENDING |
| X78709_s_at | nuclear factor |
| X54511_f_at | capping protein (actin filament) |
| w11020_g_at | 1810045K07RIK |
| Msa.2906.0_f_at | UBC |
| x75129_s_at | XDH |
| Msa.6658.0_f_at | ARL3 |
| Msa.34974.0_s_at | CD97 |
| Msa.22407.0_s_at | 5330434F23RIK |
| Msa.35779.0_s_at | DNASE1 |
| Msa.4414.0_f_at | 1110033J19RIK |
| Msa.3346.0_s_at | LSM4 |
| w11020_at | 1810045K07RIK |
| Msa.21579.0_s_at | ABCC2 |
| x04648_s_at | Fc receptor |
| w29651_s_at | PLA2G12 |
| Msa.3906.0_f_at | LGALS3 |
| ET61037_f_at | UNK_ET61037 |
| x16670_f_at | UNK_X16670 |
| Msa.34568.0_f_at | HSPCB |
| Msa.19552.0_s_at | UNK_AA013976 |
| x04120_f_at | M.musculus intracisternal A-particle IAP-IL3 genome deleted type |
| | I element inserted 5′ to the interleukin-3 gene. |
| X95280_s_at | G0/G1 switch gene 2 |
| x62772_f_at | apolipoprotein A-II |
| Z48043_s_at | coagulation factor II (thrombin) receptor-like 1 |

[0286] The foregoing description of the present invention provides illustration and description, but is not intended to be exhaustive or to limit the invention to the precise one disclosed. Modifications and variations are possible consistent with the above teachings or may be acquired from practice of the invention. Thus, it is noted that the scope of the invention is defined by the claims and their equivalents.

What is claimed is:

1. A method, comprising:
detecting an expression profile of at least one gene in a biological sample of a subject; and
comparing said expression profile to a reference expression profile of said at least one gene to detect or monitor an autoimmune disease in said subject, wherein said at least one gene is differentially expressed in pre-symptomatic lupus-affected or -predisposed tissues as compared to disease-free tissues.

2. The method of claim 1, wherein said at least one gene is differentially expressed in early-stage lupus-affected tissues as compared to said disease-free tissues.

3. The method of claim 2, wherein said at least one gene is over-expressed in both said pre-symptomatic tissues and early-stage lupus-affected tissues as compared to said disease-free tissues.

4. The method of claim 3, wherein said at least one gene includes one or more genes selected from Table 1.

5. The method of claim 2, wherein said at least one gene includes one or more genes selected from Table 5b.

6. The method of claim 2, wherein said subject is a human.

7. The method of claim 6, wherein said autoimmune disease is lupus nephritis (LN) or systemic lupus erythematosus (SLE).

8. The method of claim 2, wherein said expression profile and said reference expression profile are determined by RT-PCR or immunoassays.

9. The method of claim 2, wherein said pre-symptomatic, early-stage lupus-affected, and disease-free tissues are human kidney tissues.

10. A pharmaceutical composition comprising a pharmaceutically-acceptable carrier and at least one active component selected from the group consisting of:
a polypeptide encoded by a gene which is differentially expressed in pre-symptomatic lupus-affected or -predisposed tissues as compared to disease-free tissues;
a variant of said polypeptide; and
a polynucleotide encoding said polypeptide or said variant.

11. The pharmaceutical composition of claim 10, wherein said pharmaceutical composition is a vaccine formulation capable of eliciting an immune response against a lupus-affected or lupus-predisposed human cell or a component thereof, and wherein said gene is selected from Table 1.

12. A method comprising administering a therapeutically or prophylactically effective amount of said pharmaceutical composition of claim 10 to a subject in need thereof.

13. A pharmaceutical composition comprising a pharmaceutically-acceptable carrier and at least one active component selected from the group consisting of:
an agent capable of modulating the expression of a gene which is differentially expressed in pre-symptomatic lupus-affected or -predisposed tissues relative to disease-free tissues;
an agent capable of binding to, or modulating a biological activity of, a polypeptide encoded by said gene; and
a T cell activated by said polypeptide.

14. The pharmaceutical composition of claim 13, wherein said active component is selected from the group consisting of:
a polynucleotide comprising or encoding an RNA that is capable of inhibiting or decreasing the expression of said gene by RNA interference or an antisense mechanism;
an antibody specific for said polypeptide; and
an inhibitor of the biological activity of said polypeptide,
wherein said gene is over-expressed in said pre-symptomatic tissues relative to said disease-free tissues.

15. The pharmaceutical composition of claim 14, wherein said gene is selected from Table 1.

16. A method comprising administering a therapeutically or prophylactically effective amount of said pharmaceutical composition of claim 15 to a human who has or is predisposed to SLE or LN.

17. The pharmaceutical composition according to claim 15, wherein said active component is a polynucleotide comprising or encoding an siRNA directed to a target sequence selected from Table 3.

18. A diagnostic kit comprising:
a polynucleotide capable of hybridizing under stringent or highly stringent conditions to a sequence selected from SEQ ID NOS: 1-29, or the complement thereof; and
an antibody specific for a polypeptide selected from SEQ ID NOS:30-57.

19. A method comprising:
contacting an agent with lupus-affected or lupus-predisposed cells;
comparing expression profiles or protein activities of at least one gene in said cells before and after said contacting to determine if said agent modulates expression or protein activity of said at least one gene,
wherein said at least one gene is differentially expressed in lupus-affected or lupus-predisposed cells as compared to disease-free cells.

20. A method comprising:
administering an agent to a lupus-affected or lupus-predisposed subject;
comparing expression profiles or protein activities of at least one gene in biological samples of the subject before and after said administering to determine if said agent modulates expression or protein activity of said at least one gene in the subject,
wherein said at least one gene is differentially expressed in lupus-affected or lupus-predisposed kidney tissues as compared to disease-free kidney tissues.

The application's sequence listing, which the Patent Office published only in electronic form, follows.

SEQUENCE LISTING (21135 sequences)

SEQ ID NO: 1 - DNA, 1042 bp, Homo sapiens
gaaacccggaagtggaactctgagccattcagcgtttgggtgaagacggaggcgggttctacagagacgtaggctgtcagggagtgtttatttcgcgtccgcttctgttcctccgcgcccctgtgctgccccgactcacatactcgtccagaaccggcctcagcctctccgcgcagaagttgcccggagccatggccgagtactcctatgtgaagtctaccaagctcgtgctcaagggaaccaagacgaagagtaagaagaaaaagagcaaagataagaaaagaaaaagagaagaagatgaagaaacccagcttgatattgttggaatctggtggacagtaacaaactttggtgaaatttcaggaaccatagccattgaaatggataagggaacctatatacatgcactcgacaatggtctttttaccctgggagctccacacaaagaagttgatgagggccctagtcctccagagcagtttacggctgtcaaattatctgattccagaattgccctgaagtctggctatggaaaatatcttggtataaattcagatggacttgttgttgggcgttcagatgcaattggaccaagagaacaatgggaaccagtctttcaaaatgggaaaatggctttgttggcctcaaatagctgctttattagatgcaatgaagcaggggacatagaagcaaaaagtaaaacagcaggagaagaagaaatgatcaagattagatcctgtgctgaaagagaaaccaagaaaaaagatgacattccagaagaagacaaaggaaatgtaaaacaatgtgaaatcaattatgtaaagaaatttcagagcttccaagaccacaaacttaaaataagtaaagaagacagtaaaattcttaaaaaggctcggaaagatggatttttgcatgagacgcttctggacaggagagccaaattgaaagccgacagatactgcaagtgactgggatttttgtttctgccttatctttctgtgtttttttctgaataaaatattcagaggaaatgcttttacag

SEQ ID NO: 2 - DNA, 4586 bp, Homo sapiens
tatacttcgctacttggctagagttgcaactacagctgggttatatggctctaatctgatggaacatactgagattgatcactggttggagttcagtgctacaaaattatcttcatgtgattcctttacttctacaattaatgaactcaatcattgcctgtctctgagaacatacttagttggaaactccttgagtttagcagatttatgtgtttgggccaccctaaaaggaaatgctgcctggcaagaacagttgaaacagaagaaagctccagttcatgtaaaacgttggtttggctttcttgaagcccagcaggccttccagtcagtaggtaccaagtgggatgtttcaacaaccaaagctcgagtggcacctgagaaaaagcaagatgttgggaaatttgttgagcttccaggtgcggagatgggaaaggttaccgtcagatttcctccagaggccagtggttacttacacattgggcatgcaaaagctgctcttctgaaccagcactaccaggttaactttaaagggaaactgatcatgagatttgatgacacaaatcctgaaaaagaaaaggaagattttgagaaggttatcttggaagatgttgcaatgttgcatatcaaaccagatcaatttacttatacttcggatcattttgaaactataatgaagtatgcagagaagctaattcaagaagggaaggcttatgtggatgatactcctgctgaacagatgaaagcagaacgtgagcagaggatagaatctaaacatagaaaaaaccctattgagaagaatctacaaatgtgggaagaaatgaaaaaagggagccagtttggtcactcctgttgtttgcgagcaaaaattgacatgagtagtaacaatggatgcatgagagatccaaccctttatcgctgcaaaattcaaccacatccaagaactggaaataaatacaatgtttatccaacatatgattttgcctgccccatagttgacagcatcgaaggtgttacacatgccctgagaacaacagaataccatgacagagatgagcagttttactggattattgaagctttaggcataagaaaaccatatatttgggaatatagtcggctaaatctcaacaacacagtgctatccaaaagaaaactcacatggtttgtcaatgaaggactagtagatggatgggatgacccaagatttcctacggttcgtggtgtactgagaagagggatgacagttgaaggactgaaacagtttattgctgctcagggctcctcacgttcagtcgtgaacatggagtgggacaaaatctgggcgtttaacaaaaaggttattgacccagtggctccacgatatgttgcattactgaagaaagaagtgatcccagtgaatgtacctgaagctcaggaggagatgaaagaagtagccaaacacccaaagaatcctgaggttggcttgaagcctgtgtggtatagtcccaaagttttcattgaaggtgctgatgcagagactttttcggagggtgagatggttacatttataaattggggcaacctcaacattacaaaaatacacaaaaatgcagatggaaaaatcatatctcttgatgcaaagtttaatttggaaaacaaagactacaagaaaaccactaaggtcacttggcttgcagagactacacatgctcttcctattccagtaatctgtgtcacttatgagcacttgatcacaaagccagtgctaggaaaagacgaggactttaagcagtatgtcaacaagaacagtaagcatgaagagctaatgctaggggatccctgccttaaggatttgaaaaaaggagatattatacaactccagagaagaggattcttcatatgtgatcaaccttatgaacctgttagcccatatagttgcaaggaagccccgtgtgttttgatatacattcctgatgggcacacaaaggaaatgccaacatcagggtcaaaggaaaagaccaaagtagaagccacaaaaaatgagacctctgctccttttaaggaaagaccaacaccttctctgaataataattgtactacatctgaggattccttggtcctttacaatagagtggctgttcaaggagatgtggttcgtgaattaaaagccaagaaagcaccaaaggaagatgtagatgcagctgtaaaacagcttttgtctttgaaagctgaatataaggagaaaactggccaggaatataaacctggaaaccctcctgctgaaataggacagaatatttcttctaattcctcagcaagtattctggaaagtaaatctctgtatgatgaagttgctgcacaaggggaggtggttcgtaagctaaaagctgaaaaatcccctaaggctaaaataaatgaagctgtagaatgcttactgtccctgaaggctcagtataaagaaaaaactgggaaggagtacatacctggtcagcccccattatctcaaagttcggattcaagcccaaccagaaattctgaacctgctggtttagaaacaccagaagcgaaagtactttttgacaaagtagcttctcaaggggaagtagttcggaaacttaaaactgaaaaagcccctaaggatcaagtagatatagctgttcaagaactccttcagctaaaggcacagtacaagtctttgataggagtagagtataagcctgtgtcggccactggagctgaggacaaagataagaagaagaaagaaaaagaaaataaatctgaaaagcagaataagcctcagaaacaaaatgatggccaaaggaaagacccttctaaaaaccaaggaggtgggctctcatcaagtggagcaggagaagggcaggggcctaagaaacagaccaggttgggtcttgaggcaaaaaaagaagaaaatcttgctgattggtattctcaggtcatcacaaagtcagaaatgattgaataccatgacataagtggctgttatattcttcgtccctgggcctatgccatttgggaagccatcaaggacttttttgatgctgagatcaagaaacttggtgttgaaaactgctacttccccatgtttgtgtctcaaagtgcattagagaaagagaagactcatgttgctgactttgccccagaggttgcttgggttacaagatctggcaaaaccgagctggcagaaccaattgccattcgtcctactagtgaaacagtaatgtatcctgcatatgcaaaatgggtacaatcacacagagacctgcccatcaagctcaatcagtggtgcaatgtggtgcgttgggaattcaagcatcctcagcctttcctacgtactcgtgaatttctttggcaggaagggcacagtgcttttgctaccatggaagaggcagcggaagaggtcttgcagatacttgacttatatgctcaggtatatgaagaactcctggcaattcctgttgttaaaggaagaaagacggaaaaggaaaaatttgcaggaggagactatacaactacaatagaagcatttatatctgctagtggaagagctatccagggaggaacatcacatcatttagggcagaatttttccaaaatgtttgaaatcgtttttgaagatccaaagataccaggagagaagcaatttgcctatcaaaactcctggggcctgacaactcgaactattggtgttatgaccatggttcatggggacaacatgggtttagtattaccaccccgtgtagcatgtgttcaggtggtgattattccttgtggcattaccaatgcactttctgaagaagacaaagaagcgctgattgcaaaatgcaatgattatcgaaggcgattactcagtgttaacatccgcgttagagctgatttacgagataattattctccaggttggaaattcaatcactgggagctcaagggagttcccattagacttgaagttgggccacgtgatatgaagagctgtcagtttgtagccgtcagacgagatactggagaaaagctgacagttgctgaaaatgaggcagagactaaacttcaagctattttggaagacatccaggtcacccttttcacaagggcttctgaagaccttaagactcatatggttgtggctaatacaatggaagactttcagaagatactagattctggaaagattgttcagattccattctgtggggaaattgactgtgaggactggatcaaaaagaccactgccagggatcaagatcttgaacctggtgctccatccatgggagctaaaagcctttgcatccccttcaaaccactctgtgaactgcagcctggagccaaatgtgtctgtggcaagaaccctgccaagtactacaccttatttggtcgcagctactgagggatgaacgaaagccccctcttcaactcctctcactttttaaagcattgatattagtatcttctcagatacagaccgttttatgattttttaaaaagtaaaagttctaaaatgaagtcacacaggacaattattcttatgcctaagttaacagtggataaaagacttttctgtaaacaactccagtaataaatatcatgaacta

SEQ ID NO: 3 - DNA, 847 bp, Homo sapiens
acagcgagcggagccgcggtccggacggcagcgcgtgccccgagctctccgcctccccccgcccgccagccgaggcagctcgagcccagtccgcggccccagcagcagcgccgagagcagccccagtagcagcgccatggccgggtggaacgcctacatcgacaacctcatggcggacgggacctgtcaggacgcggccatcgtgggctacaaggactcgccctccgtctgggccgccgtccccgggaaaacgttcgtcaacatcacgccagctgaggtgggtgtcctggttggcaaagaccggtcaagtttttacgtgaatgggctgacacttgggggccagaaatgttcggtgatccgggactcactgctgcaggatggggaatttagcatggatcttcgtaccaagagcaccggtggggcccccaccttcaatgtcactgtcaccaagactgacaagacgctagtcctgctgatgggcaaagaaggtgtccacggtggtttgatcaacaagaaatgttatgaaatggcctcccaccttcggcgttcccagtactgacctcgtctgtcccttccccttcaccgctccccacagctttgcacccctttcctccccatacacacacaaaccattttattttttgggccattaccccataccccttattgctgccaaaaccacatgggctgggggccagggctggatggacagacacctccccctacccatatccctcccgtgtgtggttggaaaacttttgttttttggggttttttttttctgaataaaaaagattctactaacaaaaaaaaaaaaaaaaaaaaaaaaaaaaaaaaaaaaaaaaaa

SEQ ID NO: 4 - DNA, 868 bp, Homo sapiens
cgcgaccggcatgtacgagcaactcaagggcgagtggaaccgtaaaagccccaatcttagcaagtgcggggaagagctgggtcgactcaagctagttcttctggagctcaacttcttgccaaccacagggaccaagctgaccaaacagcagctaattctggcccgtgacatactggagatcggggcccaatggagcatcctacgcaaggacatcccctccttcgagcgctacatggcccagctcaaatgctactactttgattacaaggagcagctccccgagtcagcctatatgcaccagctcttgggcctcaacctcctcttcctgctgtcccagaaccgggtggctgagttccacacggagttggagcggctgcctgccaaggacatacagaccaatgtctacatcaagcacccagtgtccctggagcaatacctgatggagggcagctacaacaaagtgttcctggccaagggtaacatccccgccgagagctacaccttcttcattgacatcctgctcgacactatcagggatgagatcgctgggtgcatcgagaaggcctacgagaaaatccttttcactgaggccacccggatcctcttcttcaacacacccaaaaagatgacagactacgccaagaagcgagggtgggtcctgggccccaacaactactacagttttgccagccagcagcagaagccggaagacaccaccattccctccacagaactggccaaacaggtcatcgagtatgcccggcagctggagatgatcgtctgagccccccgggcactgggtggggcagggcacgagttatttaaaacagttacactgcagggtttcgcccaataaaggtggactgac

SEQ ID NO: 5 - DNA, 1525 bp, Homo sapiens
agaggcggagctccaactgacatgttcattaagggcagggctccgagggcgccacctcgagagcgacggcgggctacccggggcgggctgaggcaggttgtagccccgccccgggccttgggctccacctctcggccccacttccgccgggcaagcgtttgtaggcggcgctgccgtaaatcaggcggtctgcttgccgcatcacgcaagatggcggccgcggcggtgaacggggcggcaggcttctcgagctccgggcccgcggcaacctcgggcgctgttctgcaggccgcgaccggcatgtacgagcaactcaagggcgagtggaaccgtaaaagccccaatcttagcaagtgcggggaagagctgggtcgactcaagctagttcttctggagctcaacttcttgccaaccacagggaccaagctgaccaaacagcagctaattctggcccgtgacatactggagatcggggcccaatggagcatcctacgcaaggacatcccctccttcgagcgctacatggcccagctcaaatgctactactttgattacaaggagcagctccccgagtcagcctatatgcaccagctcttgggcctcaacctcctcttcctgctgtcccagaaccgggtggctgagttccacacggagttggagcggctgcctgccaaggacatacagaccaatgtctacatcaagcacccagtgtccctggagcaatacctgatggagggcagctacaacaaagtgttcctggccaagggtaacatccccgccgagagctacaccttcttcattgacatcctgctcgacactatcagggatgagatcgctgggtgcatcgagaaggcctacgagaaaatccttttcactgaggccacccggatcctcttcttcaacacacccaaaaagatgacagactacgccaagaagcgagggtgggtcctgggccccaacaactactacagttttgccagccagcagcagaagccggaagacaccaccattccctccacagaactggccaaacaggtcatcgagtatgcccggcagctggagatgatcgtctgagccccccgggcactgggtggggcagggcacgagttatttaaaacagttacactgcagggtttcgcccaataaaggtggactgacattccctcttccaggcccttgtctccccagttgggacggcagagagacaagttcttatatctgaagaacttggaggttttggggcattcaggagttggagatagcctccaactgggtcagcctctgtctggtgggcattgctcagggtctcaaacatggacgcccactgtggggccccagcagcactgtggcctgcaggagggcatggccccaggtagggggactgttctagccagctgtggacacataggaatgctggaccagggtaccagattttttcaacaaagggggtgaagtgtcctactaaaaagaataaatgttggcagtgaattaaacaatttttcaaatgaaaaaaaaaaaaaaaaaa

SEQ ID NO: 6 - DNA, 3525 bp, Homo sapiens
gcgatcgtggccgctgccgccgccagagccggccggagtcggcccggagccgcgtccacgcggagcgggcgggtgggagctggcggctgggcccctgcggcgcccccgcggcctgccccgcgtccgcctccgggccgccgagccgcagccgccgagatgggggccgccccgggccgcgcccccgccgggtcccgcccgccgcgctgccgctgagcgcatgggcccggaccgcgccgcgccgctccgggagccgggcccggggtcccgccaccaccgcgcgcgggacagattgattcactttggagctgtaagtactgatgtattagggtgcagcgctcattgttccttgacgcagagtcccaaaatgaatatccaagagcagggtttccccttggacctcggagcaagtttcaccgaagatgctccccgacccccagtgcctggtgaggagggagaactggtgtccacagacccgaggcccgccagctacagtttctgctccgggaaaggtgttggcattaaaggtgagacttcgacggccactccgaggcgctcggatctggacctggggtatgagcctgagggcagtgcctcccccaccccaccatacttgaagtgggctgagtcactgcattccctgctggatgaccaagatgggataagcctgttcaggactttcctgaagcaggagggctgtgccgacttgctggacttctggtttgcctgcactggcttcaggaagctggagccctgtgactcgaacgaggagaagaggctgaagctggcgagagccatctaccgaaagtacattcttgataacaatggcatcgtgtcccggcagaccaagccagccaccaagagcttcataaagggctgcatcatgaagcagctgatcgatcctgccatgtttgaccaggcccagaccgaaatccaggccactatggaggaaaacacctatccctccttccttaagtctgatatttatttggaatatacgaggacaggctcggagagccccaaagtctgtagtgaccagagctctgggtcagggacagggaagggcatatctggatacctgccgaccttaaatgaagatgaggaatggaagtgtgaccaggacatggatgaggacgatggcagagacgctgctccccccggaagactccctcagaagctgctcctggagacagctgccccgagggtctcctccagtagacggtacagcgaaggcagagagttcaggtatggatcctggcgggagccagtcaacccctattatgtcaatgccggctatgccctggccccagccaccagtgccaacgacagcgagcagcagagcctgtccagcgatgcagacaccctgtccctcacggacagcagcgtggatgggatccccccatacaggatccgtaagcagcaccgcagggagatgcaggagagcgtgcaggtcaatgggcgggtgcccctacctcacattcccgtaagtaccgggtgccgaaggaggtccgcgtggagcctcagaagttcgcggaggagctcatccaccgcctggaggctgtgcagcgcacgcgggaggccgaggagaagctggaggagcggctgaagcgcgtgcgcatggaggaggaaggtgaggacggcgatccatcgtcagggcccccagggccgtgtcacaagctgcctcccgcccccgcttggcaccacttcccgccccgctgtgtggacatgggctgtgccgggctccgggatgcacacgaggagaaccctgagagcatcctggacgagcacgtacagcgtgtgctgaggacacctggccgccagtcgcctgggcctggccatcgctccccggacagtgggcacgtggccaagatgccagtggcactggggggtgccgcctcggggcacgggaagcacgtacccaagtcaggggcgaagctggacgcggccggcctgcaccaccaccgacacgtccaccaccacgtccaccacagcacagcccggcccaaggagcaggtggaggccgaggccacccgcagggcccagagcagcttcgcctggggcctggaaccacacagccatggggcaaggtcccgaggctactcagagagtgttggcgctgcccccaacgccagtgatggcctcgcccacagtgggaaggtgggcgtggcgtgcaaaagaaatgccaagaaggctgagtcggggaagagcgccagcaccgaggtgccaggtgcctcggaggatgcggagaagaaccagaaaatcatgcagtggatcattgagggggaaaaggagatcagcaggcaccgcaggaccggccacgggtcttcggggacgaggaagccacagccccatgagaactccagacccttgtcccttgagcacccctgggccggccctcagctccggacctccgtgcagccctcccacctcttcatccaagaccccaccatgccaccccacccagctcccaaccccctaacccagctggaggaggcgcgccgacgtctggaggaggaagaaaagagagccagccgagcaccctccaagcagaggacaagatcgcagaggaaggtgggcggcgggagtgcccagccgtgtgacagcatcgttgtggcgtactacttctgcggggaacccatcccctaccgcaccctggtgaggggccgcgctgtcaccctgggccagttcaaggagctgctgaccaaaaagggcagctacagatactacttcaagaaagtgagcgacgagtttgactgtggggtggtgtttgaggaggttcgagaggacgaggccgtcctgcccgtctttgaggagaagatcatcggcaaagtggagaaggtggactgataggctggtgggctggccgctgtgccaggcgaggcccttggcgggcacgggtgtcacggccaggcagatgacctcgtactcaggagcccgatggggaacagtgttgggtgtaccacccatccctgtggtctacccgtgtctagaggcaggtagggggtccctccaagtggtccacaagcttctgtcctgcccccaaggaggcagcctggaccactcctcatagcaatacttggagggcccagcccaagtgaggcagccgaggtccctgctgccagcttcaggtgacccccccccatcccccggcacctcccttgggcacgtgtgctgggatctactttccctctgggatttgcccacgtacccaggtctgggtggggcccaggcccggatgcagaggcctgcagggcctctgtcaattgtacgcgccaccgagtgccttcaacacagcttgtctcttgcctgccactgtgtgaatcggcgacggagcactgcacctgcctccagccgccggctgtgcagtcctgggtcctcctttctgagggcccgtgtaaatatgtacatttctcaggctaggccagcaggggctgcccgagtctgtttttcatgcgatgacacttgtacaattaattatcttttcaaaggtacttggataataatgaaataaaactgtttttgaacctg

SEQ ID NO: 7 - DNA, 3477 bp, Homo sapiens
ggtcccgcccgccgcgctgccgctgagcgcatgggcccggaccgcgccgcgccgctccgggagccgggcccggggtcccgccaccaccgcgcgcgggacagattgattcactttggagctgtaagtactgatgtattagggtgcagcgctcattgttccttgacgcagagtcccaaaatgaatatccaagagcagggtttccccttggacctcggagcaagtttcaccgaagatgctccccgacccccagtgcctggtgaggagggagaactggtgtccacagacccgaggcccgccagctacagtttctgctccgggaaaggtgttggcattaaaggtgagacttcgacggccactccgaggcgctcggatctggacctggggtatgagcctgagggcagtgcctcccccaccccaccatacttgaagtgggctgagtcactgcattccctgctggatgaccaagatgggataagcctgttcaggactttcctgaagcaggagggctgtgccgacttgctggacttctggtttgcctgcactggcttcaggaagctggagccctgtgactcgaacgaggagaagaggctgaagctggcgagagccatctaccgaaagtacattcttgataacaatggcatcgtgtcccggcagaccaagccagccaccaagagcttcataaagggctgcatcatgaagcagctgatcgatcctgccatgtttgaccaggcccagaccgaaatccaggccactatggaggaaaacacctatccctccttccttaagtctgatatttatttggaatatacgaggacaggctcggagagccccaaagtctgtagtgaccagagctctgggtcagggacagggaagggcatatctggatacctgccgaccttaaatgaagatgaggaatggaagtgtgaccaggacatggatgaggacgatggcagagacgctgctccccccggaagactccctcagaagctgctcctggagacagctgccccgagggtctcctccagtagacggtacagcgaaggcagagagttcaggtatggatcctggcgggagccagtcaacccctattatgtcaatgccggctatgccctggccccagccaccagtgccaacgacagcgagcagcagagcctgtccagcgatgcagacaccctgtccctcacggacagcagcgtggatgggatccccccatacaggatccgtaagcagcaccgcagggagatgcaggagagcgtgcaggtcaatgggcgggtgcccctacctcacattccccgcacgtaccgggtgccgaaggaggtccgcgtggagcctcagaagttcgcggaggagctcatccaccgcctggaggctgtgcagcgcacgcgggaggccgaggagaagctggaggagcggctgaagcgcgtgcgcatggaggaggaaggtgaggacggcgatccatcgtcagggcccccagggccgtgtcacaagctgcctcccgcccccgcttggcaccacttcccgccccgctgtgtggacatgggctgtgccgggctccgggatgcacacgaggagaaccctgagagcatcctggacgagcacgtacagcgtgtgctgaggacacctggccgccagtcgcctgggcctggccatcgctccccggacagtgggcacgtggccaagatgccagtggcactggggggtgccgcctcggggcacgggaagcacgtacccaagtcaggggcgaagctggacgcggccggcctgcaccaccaccgacacgtccaccaccacgtccaccacagcacagcccggcccaaggagcaggtggaggccgaggccacccgcagggcccagagcagcttcgcctggggcctggaaccacacagccatggggcaaggtcccgaggctactcagagagtgttggcgctgcccccaacgccagtgatggcctcgcccacagtgggaaggtgggcgtggcgtgcaaaagaaatgccaagaaggctgagtcggggaagagcgccagcaccgaggtgccaggtgcctcggaggatgcggagaagaaccagaaaatcatgcagtggatcattgagggggaaaaggagatcagcaggcaccgcaggaccggccacgggtcttcggggacgaggaagccacagccccatgagaactccagacccttgtcccttgagcacccctgggccggccctcagctccggacctccgtgcagccctcccacctcttcatccaagaccccaccatgccaccccacccagctcccaaccccctaacccagctggaggaggcgcgccgacgtctggaggaggaagaaaagagagccagccgagcaccctccaagcagaggtatgtgcaggaggttatgcggcggggacgcgcctgcgtcaggccagcgtgcgcgccggtgctgcacgtggtaccagccgtgtcggacatggagctctccgagacagagacaagatcgcagaggaaggtgggcggcgggagtgcccagccgtgtgacagcatcgttgtggcgtactacttctgcggggaacccatcccctaccgcaccctggtgaggggccgcgctgtcaccctgggccagttcaaggagctgctgaccaaaaagggcagctacagatactacttcaagaaagtgagcgacgagtttgactgtggggtggtgtttgaggaggttcgagaggacgaggccgtcctgcccgtctttgaggagaagatcatcggcaaagtggagaaggtggactgataggctggtgggctggccgctgtgccaggcgaggcccttggcgggcacgggtgtcacggccaggcagatgacctcgtactcaggagcccgatggggaacagtgttgggtgtaccacccatccctgtggtctacccgtgtctagaggcaggtagggggtccctccaagtggtccacaagcttctgtcctgcccccaaggaggcagcctggaccactcctcatagcaatacttggagggcccagcccaagtgaggcagccgaggtccctgctgccagcttcaggtgacccccccccatcccccggcacctcccttgggcacgtgtgctgggatctactttccctctgggatttgcccacgtacccaggtctgggtggggcccaggcccggatgcagaggcctgcagggcctctgtcaattgtacgcgccaccgagtgccttcaacacagcttgtctcttgcctgccactgtgtgaatcggcgacggagcactgcacctgcctccagccgccggctgtgcagtcctgggtcctcctttctgagggcccgtgtaaatatgtacatttctcaggctaggccagcaggggctgcccgagtctgtttttcatgcgatgacacttgtacaattaattatcttttcaaaggtacttggataataatgaaataaaactgtttttgaacctgcaaaaaaaaaaaaaaaaaaaaaaaaaaaaa

SEQ ID NO: 8 - DNA, 3369 bp, Homo sapiens
ggtcccgcccgccgcgctgccgctgagcgcatgggcccggaccgcgccgcgccgctccgggagccgggcccggggtcccgccaccaccgcgcgcgggacagattgattcactttggagctgtaagtactgatgtattagggtgcagcgctcattgttccttgacgcagagtcccaaaatgaatatccaagagcagggtttccccttggacctcggagcaagtttcaccgaagatgctccccgacccccagtgcctggtgaggagggagaactggtgtccacagacccgaggcccgccagctacagtttctgctccgggaaaggtgttggcattaaaggtgagacttcgacggccactccgaggcgctcggatctggacctggggtatgagcctgagggcagtgcctcccccaccccaccatacttgaagtgggctgagtcactgcattccctgctggatgaccaagatgggataagcctgttcaggactttcctgaagcaggagggctgtgccgacttgctggacttctggtttgcctgcactggcttcaggaagctggagccctgtgactcgaacgaggagaagaggctgaagctggcgagagccatctaccgaaagtacattcttgataacaatggcatcgtgtcccggcagaccaagccagccaccaagagcttcataaagggctgcatcatgaagcagctgatcgatcctgccatgtttgaccaggcccagaccgaaatccaggccactatggaggaaaacacctatccctccttccttaagtctgatatttatttggaatatacgaggacaggctcggagagccccaaagtctgtagtgaccagagctctgggtcagggacagggaagggcatatctggatacctgccgaccttaaatgaagatgaggaatggaagtgtgaccaggacatggatgaggacgatggcagagacgctgctccccccggaagactccctcagaagctgctcctggagacagctgccccgagggtctcctccagtagacggtacagcgaaggcagagagttcaggtatggatcctggcgggagccagtcaacccctattatgtcaatgccggctatgccctggccccagccaccagtgccaacgacagcgagcagcagagcctgtccagcgatgcagacaccctgtccctcacggacagcagcgtggatgggatccccccatacaggatccgtaagcagcaccgcagggagatgcaggagagcgtgcaggtcaatgggcgggtgcccctacctcacattccccgcacgtaccgggtgccgaaggaggtccgcgtggagcctcagaagttcgcggaggagctcatccaccgcctggaggctgtgcagcgcacgcgggaggccgaggagaagctggaggagcggctgaagcgcgtgcgcatggaggaggaaggtgaggacggcgatccatcgtcagggcccccagggccgtgtcacaagctgcctcccgcccccgcttggcaccacttcccgccccgctgtgtggacatgggctgtgccgggctccgggatgcacacgaggagaaccctgagagcatcctggacgagcacgtacagcgtgtgctgaggacacctggccgccagtcgcctgggcctggccatcgctccccggacagtgggcacgtggccaagatgccagtggcactggggggtgccgcctcggggcacgggaagcacgtacccaagtcaggggcgaagctggacgcggccggcctgcaccaccaccgacacgtccaccaccacgtccaccacagcacagcccggcccaaggagcaggtggaggccgaggccacccgcagggcccagagcagcttcgcctggggcctggaaccacacagccatggggcaaggtcccgaggctactcagagagtgttggcgctgcccccaacgccagtgatggcctcgcccacagtgggaaggtgggcgtggcgtgcaaaagaaatgccaagaaggctgagtcggggaagagcgccagcaccgaggtgccaggtgcctcggaggatgcggagaagaaccagaaaatcatgcagtggatcattgagggggaaaaggagatcagcaggcaccgcaggaccggccacgggtcttcggggacgaggaagccacagccccatgagaactccagacccttgtcccttgagcacccctgggccggccctcagctccggacctccgtgcagccctcccacctcttcatccaagaccccaccatgccaccccacccagctcccaaccccctaacccagctggaggaggcgcgccgacgtctggaggaggaagaaaagagagccagccgagcaccctccaagcagaggacaagatcgcagaggaaggtgggcggcgggagtgcccagccgtgtgacagcatcgttgtggcgtactacttctgcggggaacccatcccctaccgcaccctggtgaggggccgcgctgtcaccctgggccagttcaaggagctgctgaccaaaaagggcagctacagatactacttcaagaaagtgagcgacgagtttgactgtggggtggtgtttgaggaggttcgagaggacgaggccgtcctgcccgtctttgaggagaagatcatcggcaaagtggagaaggtggactgataggctggtgggctggccgctgtgccaggcgaggcccttggcgggcacgggtgtcacggccaggcagatgacctcgtactcaggagcccgatggggaacagtgttgggtgtaccacccatccctgtggtctacccgtgtctagaggcaggtagggggtccctccaagtggtccacaagcttctgtcctgcccccaaggaggcagcctggaccactcctcatagcaatacttggagggcccagcccaagtgaggcagccgaggtccctgctgccagcttcaggtgacccccccccatcccccggcacctcccttgggcacgtgtgctgggatctactttccctctgggatttgcccacgtacccaggtctgggtggggcccaggcccggatgcagaggcctgcagggcctctgtcaattgtacgcgccaccgagtgccttcaacacagcttgtctcttgcctgccactgtgtgaatcggcgacggagcactgcacctgcctccagccgccggctgtgcagtcctgggtcctcctttctgagggcccgtgtaaatatgtacatttctcaggctaggccagcaggggctgcccgagtctgtttttcatgcgatgacacttgtacaattaattatcttttcaaaggtacttggataataatgaaataaaactgtttttgaacctgcaaaaaaaaaaaaaaaaaaaaaaaaaaaaa

SEQ ID NO: 9 - DNA, 3147 bp, Homo sapiens
aggcgtctgaggggcggacggaggcggcggcggcggcggcgggagcgggagcgggcggcgagtggggagcggggccgggagtggagcagccgccgcggcgggactggaccgagcctcgccggcgcgcacctgcccgcagcgcccgcggagcgcgcagcgcggcccgagcgcgacgacctgccgagcggcggccgaggcggcggtgtgggcgcgtcaggccgcgacgagggcgctgagacaaatttacatgtattggagaccagaccagaagcccttctgaattaagatctcacattcttgaaggtggcattgaagagcactaagatcggaagatgagtgagcttgaccagttacggcaggaggccgagcaacttaagaaccagattcgagacgccaggaaagcatgtgcagatgcaactctctctcagatcacaaacaacatcgacccagtgggaagaatccaaatgcgcacgaggaggacactgcgggggcacctggccaagatctacgccatgcactggggcacagactccaggcttctcgtcagtgcctcgcaggatggtaaacttatcatctgggacagctacaccaccaacaaggtccacgccatccctctgcgctcctcctgggtcatgacctgtgcatatgccccttctgggaactatgtggcctgcggtggcctggataacatttgctccatttacaatctgaaaactcgtgaggggaacgtgcgcgtgagtcgtgagctggcaggacacacaggttacctgtcctgctgccgattcctggatgacaatcagatcgtcaccagctctggagacaccacgtgtgccctgtgggacatcgagaccggccagcagacgaccacgtttaccggacacactggagatgtcatgagcctttctcttgctcctgacaccagactgttcgtctctggtgcttgtgatgcttcagccaaactctgggatgtgcgagaaggcatgtgccggcagaccttcactggccacgagtctgacatcaatgccatttgcttctttccaaatggcaatgcatttgccactggctcagacgacgccacctgcaggctgtttgaccttcgtgctgaccaggagctcatgacttactcccatgacaacatcatctgcgggatcacctctgtctccttctccaagagcgggcgcctcctccttgctgggtacgacgacttcaactgcaacgtctgggatgcactcaaagccgaccgggcaggtgtcttggctgggcatgacaaccgcgtcagctgcctgggcgtgactgacgatggcatggctgtggcgacagggtcctgggatagcttcctcaagatctggaactaacgccagtagcatgtggatgccatggagactggaagaccattccaacttggacgcgttaccatgagagcatatcctatccaaccgtactaacgtggacaccctacacctcccctcagaacttcaaaagggcaagatcttttttccttcacttattgctgaaaccaagagcacaattcccattgagagaaagatctctgtgctgtaaactaaaacaaattgtgcattccttccggggccatcgtctttgttttcttttttgtcttgaatgaattttaaaaggaaatatataataaaaatgttaaccagaaggtaaacttgagtgtaattgtcagacagacacacttttccaccagtgtatttgaattttagaccagtgaccctgttttgtggcattcatgcaaaacatgctgagggctttgttcatctggtcatcgtgtccaaatttcagtcatgtttgtagcaagattttggaagcattcatatttcctttttaaaatgtattcctttgtgttcaacagttaatcaaaaccagagagtctagggcagcctctctgatgttgtcaatgatgtaaattcagtccctggtttttaattttctgtctgatgtcacagatcattgttgcacacaaacgtggcatagaaaagaacatgttcagaagccatggggccaagcacatgcggggacggtctcaaatgcgtgatcagagaatccttcacctttgctgaaaagtgagctcagatccagcaccatgttcctcctgacccatcctgtctatcttctcagttgagtttttaatctcactttgggtttccttgtgaagttggagggaagtttataatagcctaacactaccccacccccaactaggaggaacctctgttttcaagagagatgcctgtcctgtgcttggatagtcagtcaattatttgtgtatgaaacaatgtacaaatcaatgttttgaaaataatgatctcagactttctaagttaaattttaaaaattttgattgtttgccatattgggtgggtttactcttagaatcgcatgctgtagaaatgctcaaaagtgcatatgggactcagtccttaggtgttctttttcttttaagaaataacctcttacagttgtaaccattgcggctctgtccacttctcgttgctgctctgtggcacatatcggaagcagtacagcgcgcggctctacacgcttgggtagcgggataagtcactgttttctttatttctttaaaaaaaaaaaagttctgttgcaaacgactgctgttggattctgagggtggggagggagagagagggagggagagggagtgaagagcctgccctcctatatggattcttcagggccctccacatctgaggtggctcattcccatcacacacagattgtcctggtgttcatttcaaggccagtgttcagcagcagcgtttggaaagcaggttctgtgggaccccccgccccgccccccgcactccttcatagcagcagtagtggcttctccatcctgttttctgcaacattctatacaaaactgtgctgtgaccttgcggtaggcctggatctggcaaagagaatacaaatgaaaccccttctttctctttccgtccaacaactctgtagagctctctgcacccttacccctttccaccttttgtatttaattttaaagtcagtgtactgcaaggaagctggatgcaagatagatactatattaaactgtactgttatttaagatgtaataaagcagtttgacatgaaaaaaaaaaaaaaaaaaaa

SEQ ID NO: 10 - DNA, 8050 bp, Homo sapiens
gggagggacgaaccgcgcgaccgagccctacaaaacccgccccggccgagtggcgaggcgagctttccagccgggctcccagagcgcgctgcgcaggagacgcggtggcctgagagcctgagggtccccggactcgcccaggctctgagctctctcccaccatgagcgcccggaccgcccccaggccgcaggtgctcctgctgccgctcctgctggtgctcctggcggcggcgcccgcagccagcaagggttgtgtctgtaaagacaaaggccagtgcttctgtgacggggccaaaggggagaagggggagaagggctttcctggaccccccggttctcctggccagaaaggattcacaggtcctgaaggcttgcctggaccgcagggacccaagggctttccaggacttccaggactcacgggttccaaaggtgtaaggggaataagtggattgccaggattttctggttctcctggacttccaggcaccccaggcaataccgggccttacggacttgtcggtgtaccaggatgcagtggttctaagggtgagcaggggtttccaggactcccagggacaccgggctacccagggatcccgggtgctgctggtttgaaaggacaaaagggtgctcctgctaaaggagaagatatagaacttgatgcaaaaggcgaccccgggttgccaggggctccaggaccccagggtttgccaggccctccaggttttcctgggcctgttggcccacctggtcctccgggattctttggctttccaggagccatgggacctagaggacctaagggtcacatgggtgaaagagtgataggacataaaggagagcggggtgtgaaagggttaacaggacccccgggaccaccaggaacagttattgtgaccctaactggcccagataacagaacggacctcaagggggaaaagggagacaagggagcaatgggcgagcctggacctcctggaccctcaggactgcctggagaatcatatggatctgaaaagggtgctcctggagaccctggcctgcagggaaaacccggaaaagatggtgttcctggcttccctggaagtgagggagtcaagggcaacaggggtttccctgggttaatgggtgaagatggcattaagggacagaaaggggacattggccctccaggatttcgtggtccaacagaatattatgacacataccaggaaaagggagatgaaggcactccaggcccaccagggcccagaggagctcgtggcccacaaggtcccagtggtccccccggagttcctggaagtcctggatcatcaaggcctggcctcagaggagcccctggatggccaggcttgaaaggaagtaaaggggaacgaggccgcccaggaaaggatgccatggggactcctgggtccccaggttgtgctggttcaccaggtcttccaggatcaccgggacctccaggaccgccaggtgacatcgtttttcgcaagggtccacctggagatcacggactgccaggctatctagggtctccaggaatcccaggagttgatgggcccaaaggagaaccaggcctcctgtgtacacagtgcccttatatcccagggcctcccggtctcccaggattgccagggttacatggtgtaaaaggaatcccaggaagacaaggcgcagctggcttgaaaggaagcccagggtccccaggaaatacaggtcttccaggatttccaggtttcccaggtgcccagggtgacccaggacttaaaggagaaaaaggtgaaacacttcagcctgaggggcaagtgggtgtcccaggtgacccggggctcagaggccaacctgggagaaagggcttggatggaattcctggaactctgggagtgaaaggattaccaggacctaaaggcgaactggctctgagtggtgagaaaggggaccaaggtcctccaggggatcctggctcccctgggtccccaggacctgcaggaccagctggaccacctggctacggaccccaaggagaacctggtctccagggcacgcaaggagttcctggggcccccggaccacccggagaagccggccctaggggagagctcagtgtttcaacaccagttccaggccctccaggacctccagggccccctggccatcctggcccccaaggtccacctggtatccctggatccctggggaaatgtggagatcctggtcttccagggcctgatggtgaaccaggaattccaggaattggatttcctgggccacctggacctaagggagaccaaggttttccaggtacaaaaggatcactgggttgtcctggaaaaatgggagagcctgggttacctggaaagccaggcctcccaggagccaagggagaaccagcagtagccatgcctggaggaccaggaacaccaggttttccaggagaaagaggcaattctggggaacatggagaaattggactccctggacttccaggtctccctggaactccaggaaatgaagggcttgatggaccacgaggagatccagggcagcctggaccacctggagaacaaggacccccaggaaggtgcatagagggtcccaggggagcccaaggacttccaggcttaaatggattgaaagggcaacaaggcagaagaggtaaaacggggccaaagggagacccaggaattccaggcttggatagatcaggatttcctggagaaactggatcaccaggaattccaggtcatcaaggtgaaatgggaccactgggtcaaagaggatatccaggaaatccgggaattttagggccaccaggtgaagatggagtgattgggatgatgggatttcctggagccattggccctccagggccccctgggaacccaggcacaccagggcagagggggagccctggaattccaggagtaaagggccagagaggaaccccaggagccaagggggaacaaggagataaaggaaatcccgggccttcagagatatcccacgtaataggggacaaaggagaaccaggtctcaaaggattcgcaggaaatccaggtgagaaaggaaacagaggcgttccagggatgccaggtttaaagggcctcaaaggactacccggaccagcaggaccaccaggccccagaggagatttgggcagcactgggaatcctggagaaccaggactccgtggtataccaggaagcatggggaacatgggcatgccaggttctaaaggaaaaaggggaactttgggattcccaggtcgagcaggaagaccaggcctcccaggtattcatggtctccagggagataagggagagccaggttattcagaaggtacaaggccaggaccaccgggaccaacgggggatccaggactgccgggtgatatgggaaagaaaggagaaatggggcaacctggcccacctggacatttggggcctgctggacctgagggagcccctggaagtcctggaagtcctggcctcccaggaaagccaggtcctcatggtgatttgggttttaaaggaatcaaaggcctcctgggccctccaggaatcagaggccctccaggtcttccaggatttccaggatctcctggaccaatgggtataagaggtgaccaaggacgtgatggaattcctggtccagccggagaaaagggagaaacgggtttattgagggcccctccaggcccaagagggaaccctggtgctcaaggagccaaaggagacaggggagccccaggttttcctggcctcccgggcagaaaaggggccatgggagatgctggacctcgaggacccacaggcatagaaggattcccagggccaccaggtctgcccggtgcaattatccctggccagacaggaaatcgtggtccaccaggctcaagaggaagcccaggtgcgcctggtccccctggacctccagggagtcatgtaataggcataaaaggagacaaagggtctatgggccaccctggcccaaaaggtccacctggaactgcaggagacatgggaccaccaggtcgtctgggagcaccaggtactccaggtcttccaggacccagaggtgatcctggattccaggggtttccaggcgtgaaaggagaaaagggtaatcctggatttctaggatccattggacctccaggaccaattgggccaaaaggaccacctggtgtacgtggagaccctggcacacttaagattatctcccttccaggaagcccagggccacctggcacacctggagaaccagggatgcagggagaacctgggccaccagggccacctggaaacctaggaccctgtgggccaagaggtaagccaggcaaggatggaaaaccaggaactcctggaccagctggagaaaaaggcaacaaaggttctaaaggagagccaggaccagctggatcagatggattgccaggtttgaaaggaaaacgtggagacagtggatcacctgcaacctggacaacgagaggctttgtcttcacccgacacagtcaaaccacagcaattccttcatgtccagaggggacagtgccactctacagtgggttttcttttctttttgtacaaggaaatcaacgagcccacggacaagaccttggaactcttggcagctgcctgcagcgatttaccacaatgccattcttattctgcaatgtcaatgatgtatgtaattttgcatctcgaaatgattattcatactggctgtcaacaccagctctgatgccaatgaacatggctcccattactggcagagcccttgagccttatataagcagatgcactgtttgtgaaggtcctgcgatcgccatagccgttcacagccaaaccactgacattcctccatgtcctcacggctggatttctctctggaaaggattttcattcatcatgttcacaagtgcaggttctgagggcaccgggcaagcactggcctcccctggctcctgcctggaagaattccgagccagcccatttctagaatgtcatggaagaggaacgtgcaactactattcaaattcctacagtttctggctggcttcattaaacccagaaagaatgttcagaaagcctattccatcaactgtgaaagctggggaattagaaaaaataataagtcgctgtcaggtgtgcatgaagaaaagacactgaagctaaaaaagacatgcagaactgctatttttcatcctaaagaacaaagtaatgacagaacatgctgttatttaggtatttttctttaaccaaacaatattgctccatgatgacttagtacaaagtttcaatttgtttccccacaaaacaaagcaattctttcaagtgcagttctgtgatctgggtctctaatctgtgctgtttcaaagttctctgtggcaaagcagcaactattcacaaaatatcaccaaaaacctattccacttacatccaaggcactgtcactacggtgattgtatgaagtttgaatgctgcacgttatgaaatatttggcccgctggattcccacatttgtcttctttctgtctttaagactcagggaggctaaatcagtgtttgattgccccgccaacccttcctgaaacttcagaccctgggtagggaagagaaggggcatgtggtatctggagcattgtgtatagaactggattttcagacctgctgaggaccgtaaggcctgatggaacacagaactgaactgaggttcatggattttccaggactgtttcaaacatgcccattactaacggcaaaagggggattccctgatggaaccataatacccttggaaatactgtatggttttgttttgttttgttggtttttaaagatttttgtttgtttattgaattcattcactgtagctctaaaatctgcttgtatccaagcatataaaattttcccccttagtgaattagttttaaaatgatattgttatatacatactatgaaatatgtataactttaacttctgttttaccagcatacgcacacaaataacaagaatactacttatgaaatgtgcactttatcctcattccataaatgttggtgcataccttatgtaagggagcagttcaataatccatgaaagaacttaaggcatttgttggtttatcagactcggaatctatttttctcattgctctgaatatgtcatcactctaggttttacagatttattcctttgttacttctctaattcttcctttgtaaaaaaaaaaaaagcaacacttttttttatgttatatgttgtcttacaaaccatactgaaagagtcattgtttaaaatcttaatgtatcaaactgtataacttggccgctgtatgtcttaaaacctgcttttcaatgtgttgatacattcccaaggttacttaattcaacttaactatcatgttattcagcaccaagcatgtccaggcactgtactaacctacagagatgctaagagaaaaaaaagacttgtttctgatctaatatccagaaaaagtaactcattgctctgtaataatctcacatatacagtagcttcctccctctagttttttcttccttgtcactgctgttatatttcatcatgataattcagcaggccagtaaggtaaaaataaggtctatgcctagggaaactcaggcttctagtttctcttagaaaagctaagagaagataaggtctgaataatagcagaaaaaccaacatctacaaaacattaaactagtgttataccttgatgataacactattgatgagtcttagagtccagacacaaagagacaaagctttgaagatgcttttgatctacctaggtggagttggtggtgctgatatttaaattcaggctactgcttcaatctcaattgctttgtaagtgaaaacatgacccagagacagacagactatggccatggctcacatggtttacatccttcactgctcacgtgtttgctgtcaagccatttttacagtctgaaactaagatgtgcagcatttcacttatttagattcacttaacaaacaaatttttctgctttaaaaatgtcttattgtcccaaggtactatagcggatatagagctagctaatctctacaaaccctctgtaggccagtagttctcaaagtgtggtctctggaagagcagtatcagcatcatctgggaacttgtcacagatgcagattctagggaccactccagacctacagaatcagaaactcttgggggagggcccgaaatatctatgttttaccaagcccaccacatgattctgatgtactctaaatactgagaaaacctgttctatcaatccaagcacactccgcaggcagttaccagtacggctggctacaactgctccatccgtgcctctttttaaagttcaaactcacaggtgactctaaggttatctacttttactcataagtaaaagccctagactggtgctaatgtcaaaccactggcctccactcaggcctccatcttctcatgccctcttaccagtatttaacttctgaggaagacaagtgatgctaaaacctgaattccaatgaagccatatgaaccagctgtcagttgcacttctaagactttacttagcagtaaattatagctcatgtgcattatttcagatacttagcttatgagtagcttatacaattagtgaagattaatattacagattaaatgtaactgttcttaaattgggctcacttgattcacagcgtgcatacacagattgtgagaagtcttcagcaagataaacattattaactaacttatttatgaagtattaaaatgcttacatttgaacttgatggctaacttactaagattctctatgtatcaaatgtaacttactgcgactaaacttaatttaatatttactctataaccaaatgaaatatatttaaaatatattgaatattttatattgttatatcctgacaagattgttaatattttaatgtactaatatttctgtcaattatatctaaatattattttattatattgcctaagaataaacatttgttaaattgg

SEQ ID NO: 11 - DNA, 7877 bp, Homo sapiens
gggagggacgaaccgcgcgaccgagccctacaaaacccgccccggccgagtggcgaggcgagctttccagccgggctcccagagcgcgctgcgcaggagacgcggtggcctgagagcctgagggtccccggactcgcccaggctctgagctctctcccaccatgagcgcccggaccgcccccaggccgcaggtgctcctgctgccgctcctgctggtgctcctggcggcggcgcccgcagccagcaagggttgtgtctgtaaagacaaaggccagtgcttctgtgacggggccaaaggggagaagggggagaagggctttcctggaccccccggttctcctggccagaaaggattcacaggtcctgaaggcttgcctggaccgcagggacccaagggctttccaggacttccaggactcacgggttccaaaggtgtaaggggaataagtggattgccaggattttctggttctcctggacttccaggcaccccaggcaataccgggccttacggacttgtcggtgtaccaggatgcagtggttctaagggtgagcaggggtttccaggactcccagggacaccgggctacccagggatcccgggtgctgctggtttgaaaggacaaaagggtgctcctgctaaaggagaagatatagaacttgatgcaaaaggcgaccccgggttgccaggggctccaggaccccagggtttgccaggccctccaggttttcctgggcctgttggcccacctggtcctccgggattctttggctttccaggagccatgggacctagaggacctaagggtcacatgggtgaaagagtgataggacataaaggagagcggggtgtgaaagggttaacaggacccccgggaccaccaggaacagttattgtgaccctaactggcccagataacagaacggacctcaagggggaaaagggagacaagggagcaatgggcgagcctggacctcctggaccctcaggactgcctggagaatcatatggatctgaaaagggtgctcctggagaccctggcctgcagggaaaacccggaaaagatggtgttcctggcttccctggaagtgagggagtcaagggcaacaggggtttccctgggttaatgggtgaagatggcattaagggacagaaaggggacattggccctccaggatttcgtggtccaacagaatattatgacacataccaggaaaagggagatgaaggcactccaggcccaccagggcccagaggagctcgtggcccacaaggtcccagtggtccccccggagttcctggaagtcctggatcatcaaggcctggcctcagaggagcccctggatggccaggcttgaaaggaagtaaaggggaacgaggccgcccaggaaaggatgccatggggactcctgggtccccaggttgtgctggttcaccaggtcttccaggatcaccgggacctccaggaccgccaggtgacatcgtttttcgcaagggtccacctggagatcacggactgccaggctatctagggtctccaggaatcccaggagttgatgggcccaaaggagaaccaggcctcctgtgtacacagtgcccttatatcccagggcctcccggtctcccaggattgccagggttacatggtgtaaaaggaatcccaggaagacaaggcgcagctggcttgaaaggaagcccagggtccccaggaaatacaggtcttccaggatttccaggtttcccaggtgcccagggtgacccaggacttaaaggagaaaaaggtgaaacacttcagcctgaggggcaagtgggtgtcccaggtgacccggggctcagaggccaacctgggagaaagggcttggatggaattcctggaactctgggagtgaaaggattaccaggacctaaaggcgaactggctctgagtggtgagaaaggggaccaaggtcctccaggggatcctggctcccctgggtccccaggacctgcaggaccagctggaccacctggctacggaccccaaggagaacctggtctccagggcacgcaaggagttcctggggcccccggaccacccggagaagccggccctaggggagagctcagtgtttcaacaccagttccaggccctccaggacctccagggccccctggccatcctggcccccaaggtccacctggtatccctggatccctggggaaatgtggagatcctggtcttccagggcctgatggtgaaccaggaattccaggaattggatttcctgggccacctggacctaagggagaccaaggttttccaggtacaaaaggatcactgggttgtcctggaaaaatgggagagcctgggttacctggaaagccaggcctcccaggagccaagggagaaccagcagtagccatgcctggaggaccaggaacaccaggttttccaggagaaagaggcaattctggggaacatggagaaattggactccctggacttccaggtctccctggaactccaggaaatgaagggcttgatggaccacgaggagatccagggcagcctggaccacctggagaacaaggacccccaggaaggtgcatagagggtcccaggggagcccaaggacttccaggcttaaatggattgaaagggcaacaaggcagaagaggtaaaacggggccaaagggagacccaggaattccaggcttggatagatcaggatttcctggagaaactggatcaccaggaattccaggtcatcaaggtgaaatgggaccactgggtcaaagaggatatccaggaaatccgggaattttagggccaccaggtgaagatggagtgattgggatgatgggatttcctggagccattggccctccagggccccctgggaacccaggcacaccagggcagagggggagccctggaattccaggagtaaagggccagagaggaaccccaggagccaagggggaacaaggagataaaggaaatcccgggccttcagagatatcccacgtaataggggacaaaggagaaccaggtctcaaaggattcgcaggaaatccaggtgagaaaggaaacagaggcgttccagggatgccaggtttaaagggcctcaaaggactacccggaccagcaggaccaccaggccccagaggagatttgggcagcactgggaatcctggagaaccaggactccgtggtataccaggaagcatggggaacatgggcatgccaggttctaaaggaaaaaggggaactttgggattcccaggtcgagcaggaagaccaggcctcccaggtattcatggtctccagggagataagggagagccaggttattcagaaggtacaaggccaggaccaccgggaccaacgggggatccaggactgccgggtgatatgggaaagaaaggagaaatggggcaacctggcccacctggacatttggggcctgctggacctgagggagcccctggaagtcctggaagtcctggcctcccaggaaagccaggtcctcatggtgatttgggttttaaaggaatcaaaggcctcctgggccctccaggaatcagaggccctccaggtcttccaggatttccaggatctcctggaccaatgggtataagaggtgaccaaggacgtgatggaattcctggtccagccggagaaaagggagaaacgggtttattgagggcccctccaggcccaagagggaaccctggtgctcaaggagccaaaggagacaggggagccccaggttttcctggcctcccgggcagaaaaggggccatgggagatgctggacctcgaggacccacaggcatagaaggattcccagggccaccaggtctgcccggtgcaattatccctggccagacaggaaatcgtggtccaccaggctcaagaggaagcccaggtgcgcctggtccccctggacctccagggagtcatgtaataggcataaaaggagacaaagggtctatgggccaccctggcccaaaaggtccacctggaactgcaggagacatgggaccaccaggtcgtctgggagcaccaggtactccaggtcttccaggacccagaggtgatcctggattccaggggtttccaggcgtgaaaggagaaaagggtaatcctggatttctaggatccattggacctccaggaccaattgggccaaaaggaccacctggtgtacgtggagaccctggcacacttaagattatctcccttccaggaagcccagggccacctggcacacctggagaaccagggatgcagggagaacctgggccaccagggccacctggaaacctaggaccctgtgggccaagaggtaagccaggcaaggatggaaaaccaggaactcctggaccagctggagaaaaaggcaacaaaggttctaaaggagagccaggaccagctggatcagatggattgccaggtttgaaaggaaaacgtggagacagtggatcacctgcaacctggacaacgagaggctttgtcttcacccgacacagtcaaaccacagcaattccttcatgtccagaggggacagtgccactctacagtgggttttcttttctttttgtacaaggaaatcaacgagcccacggacaagaccttggaactcttggcagctgcctgcagcgatttaccacaatgccattcttattctgcaatgtcaatgatgtatgtaattttgcatctcgaaatgattattcatactggctgtcaacaccagctctgatgccaatgaacatggctcccattactggcatagcccttgagccttatataagcagatgcactgtttgtgaaggtcctgcgatcgccatagccgttcacagccaaaccactgacattcctccatgtcctcacggctggatttctctctggaaaggattttcattcatcatgaaagcctattccatcaactgtgaaagctggggaattagaaaaaataataagtcgctgtcaggtgtgcatgaagaaaagacactgaagctaaaaaagacatgcagaactgctatttttcatcctaaagaacaaagtaatgacagaacatgctgttatttaggtatttttctttaaccaaacaatattgctccatgatgacttagtacaaagtttcaatttgtttccccacaaaacaaagcaattctttcaagtgcagttctgtgatctgggtctctaatctgtgctgtttcaaagttctctgtggcaaagcagcaactattcacaaaatatcaccaaaaacctattccacttacatccaaggcactgtcactacggtgattgtatgaagtttgaatgctgcacgttatgaaatatttggcccgctggattcccacatttgtcttctttctgtctttaagactcagggaggctaaatcagtgtttgattgccccgccaacccttcctgaaacttcagaccctgggtagggaagagaaggggcatgtggtatctggagcattgtgtatagaactggattttcagacctgctgaggaccgtaaggcctgatggaacacagaactgaactgaggttcatggattttccaggactgtttcaaacatgcccattactaacggcaaaagggggattccctgatggaaccataatacccttggaaatactgtatggttttgttttgttttgttggtttttaaagatttttgtttgtttattgaattcattcactgtagctctaaaatctgcttgtatccaagcatataaaattttcccccttagtgaattagttttaaaatgatattgttatatacatactatgaaatatgtataactttaacttctgttttaccagcatacgcacacaaataacaagaatactacttatgaaatgtgcactttatcctcattccataaatgttggtgcataccttatgtaagggagcagttcaataatccatgaaagaacttaaggcatttgttggtttatcagactcggaatctatttttctcattgctctgaatatgtcatcactctaggttttacagatttattcctttgttacttctctaattcttcctttgtaaaaaaaaaaaaagcaacacttttttttatgttatatgttgtcttacaaaccatactgaaagagtcattgtttaaaatcttaatgtatcaaactgtataacttggccgctgtatgtcttaaaacctgcttttcaatgtgttgatacattcccaaggttacttaattcaacttaactatcatgttattcagcaccaagcatgtccaggcactgtactaacctacagagatgctaagagaaaaaaaagacttgtttctgatctaatatccagaaaaagtaactcattgctctgtaataatctcacatatacagtagcttcctccctctagttttttcttccttgtcactgctgttatatttcatcatgataattcagcaggccagtaaggtaaaaataaggtctatgcctagggaaactcaggcttctagtttctcttagaaaagctaagagaagataaggtctgaataatagcagaaaaaccaacatctacaaaacattaaactagtgttataccttgatgataacactattgatgagtcttagagtccagacacaaagagacaaagctttgaagatgcttttgatctacctaggtggagttggtggtgctgatatttaaattcaggctactgcttcaatctcaattgctttgtaagtgaaaacatgacccagagacagacagactatggccatggctcacatggtttacatccttcactgctcacgtgtttgctgtcaagccatttttacagtctgaaactaagatgtgcagcatttcacttatttagattcacttaacaaacaaatttttctgctttaaaaatgtcttattgtcccaaggtactatagcggatatagagctagctaatctctacaaaccctctgtaggccagtagttctcaaagtgtggtctctggaagagcagtatcagcatcatctgggaacttgtcacagatgcagattctagggaccactccagacctacagaatcagaaactcttgggggagggcccgaaatatctatgttttaccaagcccaccacatgattctgatgtactctaaatactgagaaaacctgttctatcaatccaagcacactccgcaggcagttaccagtacggctggctacaactgctccatccgtgcctctttttaaagttcaaactcacaggtgactctaaggttatctacttttactcataagtaaaagccctagactggtgctaatgtcaaaccactggcctccactcaggcctccatcttctcatgccctcttaccagtatttaacttctgaggaagacaagtgatgctaaaacctgaattccaatgaagccatatgaaccagctgtcagttgcacttctaagactttacttagcagtaaattatagctcatgtgcattatttcagatacttagcttatgagtagcttatacaattagtgaagattaatattacagattaaatgtaactgttcttaaattgggctcacttgattcacagcgtgcatacacagattgtgagaagtcttcagcaagataaacattattaactaacttatttatgaagtattaaaatgcttacatttgaacttgatggctaacttactaagattctctatgtatcaaatgtaacttactgcgactaaacttaatttaatatttactctataaccaaatgaaatatatttaaaatatattgaatattttatattgttatatcctgacaagattgttaatattttaatgtactaatatttctgtcaattatatctaaatattattttattatattgcctaagaataaacatttgttaaattgg

SEQ ID NO: 12 - DNA, 538 bp, Homo sapiens
gctacactagagcagagtacgagtctgaggcggagggagtaatggcaggacaagcgtttagaaagtttcttccactctttgaccgagtattggttgaaaggagtgctgctgaaactgtaaccaaaggaggcattatgcttccagaaaaatctcaaggaaaagtattgcaagcaacagtagtcgctgttggatcgggttctaaaggaaagggtggagagattcaaccagttagcgtgaaagttggagataaagttcttctcccagaatatggaggcaccaaagtagttctagatgacaaggattatttcctatttagagatggtgacattcttggaaagtacgtagactgaaataagtcactattgaaatggcatcaacatgatgctgcccattccactgaagttctgaaatctttcgtcatgtaaataatttccatatttctcttttataataaactaatgataactaatgacatccagtgtctccaaaattgtttccttgtactgatataaacacttccaaataaaaatatgtaaat

SEQ ID NO: 13 - DNA, 1017 bp, Homo sapiens
cggtcaagatggcgctggtggcttctgtgcgagtcccggcgcgcgttctgctccgcgcgggggcccggctcccgggcgcggccctcgggcggacggagcgggcggccggcggcggagacggcgcgcggccgttcgggagccagcgggtgctggtggagccggacgcggccgcaggggtcgctgtgatgaaattcaagaaccccccagtgaacagcctgagcctggagtttctgacggagctggtcatcagcctggagaagctggagaatgacaagagcttccgcggtgtcattctgacctcggaccgcccgggtgtcttctcggccggcctggacctgacggagatgtgtgggaggagccccgcccactacgctgggtactggaaggccgttcaggagctgtggctgcggttgtaccagtccaacctggtgctggtctccgccatcaacggagcctgccccgctggaggctgcctggtggccctgacctgtgactaccgcatcctggcggacaaccccaggtactgcataggactcaatgagacccagctgggcatcatcgcccctttctggttgaaagacaccctggagaacaccatcgggcaccgggcggcggagcgtgccctgcagctggggctgctcttcccgccggcggaggccctgcaggtgggcatagtggaccaggtggtcccggaggagcaggtgcagagcactgcgctgtcagcgatagcccagtggatggccattccagaccatgctcgacagctgaccaaggccatgatgcgaaaggccacggccagccgcctggtcacgcagcgcgatgcggacgtgcagaacttcgtcagcttcatctccaaagactccatccagaagtccctgcagatgtacttagagaggctcaaagaagaaaaaggctaacgattgggctgccacaggcttacggccacacgtgcccctgtgggtcccagggaggtcttaaacaaggtatttttcaacttaaaaaaaaaaaaaaaaaaaa

SEQ ID NO: 14 - DNA, 1190 bp, Homo sapiens
gccctccacaaagctcctgggcccctcctcccttcaaggattgcgaagaactggtcgcaaatcctcctaagccaccagcatctcggtcttcagctcacaccagccttgagcccagcctgcggccaggggaccacgcacgtcccacccacccagcgactccccagccgctgcccactcttcctcactcatggggaacagcaaaagtggggccctgtccaaggagatcctggaggagctgcagctgaacaccaagttctcggaggaggagctgtgctcctggtaccagtccttcctgaaggactgtcccaccggccgcatcacccagcagcagttccagagcatctacgccaagttcttccccgacaccgaccccaaggcctacgcccagcatgtgttccgcagcttcgattccaacctcgacggcaccctggacttcaaggagtacgtcatcgccctgcacatgaccaccgcgggcaagaccaaccagaagctggagtgggccttctccctctacgacgtggacggtaacgggaccatcagcaagaatgaagtgctggagatcgtcatggctattttcaaaatgatcactcccgaggacgtgaagctccttccagacgatgaaaacacgccggaaaagcgagccgagaagatctggaagtactttggaaagaatgatgatgataaacttacagagaaagaattcattgaggggacactggccaataaggaaattctgcgactgatccagtttgagcctcaaaaagtgaaggaaaagatgaagaacgcctgatgccaactgttcagctgtcctccctccacctaccactcacatgacacccgtgagcgcctgtgcacacacacacacatgcacacacacgcgcgcgcacacacacacacacacatccaccccagggccaagagaaaggcctgcacacaagcccacagcacagctccctgccaaactgaagcatctgtagtgacccactggttccttcttcctgggtcttcagcattccctcccatcatgcccggtcccacccctccctctgtccaccagcccatgtccctgtgctaatcccaggattaggccataggagtcctaagtgtcaccccgctgtaagctcctttgtggagtgctgggtaagcagtttccaataaacgcaagctgagctggaaaaaaaaaaaaaaaa

SEQ ID NO: 15 - DNA, 4469 bp, Homo sapiens
cctgcagcctccggagtcagtgccgcgcgcccgccgccccgcgccttcctgctcgccgcacctccgggagccggggcgcacccagcccgcagcgccgcctccccgcccgcgccgcctccgaccgcaggccgagggccgccactggccggggggaccgggcagcagcttgcggccgcggagccgggcaacgctggggactgcgccttttgtccccggaggtccctggaagtttgcggcaggacgcgcgcggggaggcggcggaggcagccccgacgtcgcggagaacagggcgcagagccggcatgggcatcgggcgcagcgaggggggccgccgcggggccctgggcgtgctgctggcgctgggcgcggcgcttctggccgtgggctcggccagcgagtacgactacgtgagcttccagtcggacatcggcccgtaccagagcgggcgcttctacaccaagccacctcagtgcgtggacatccccgcggacctgcggctgtgccacaacgtgggctacaagaagatggtgctgcccaacctgctggagcacgagaccatggcggaggtgaagcagcaggccagcagctgggtgcccctgctcaacaagaactgccacgccgggacccaggtcttcctctgctcgctcttcgcgcccgtctgcctggaccggcccatctacccgtgtcgctggctctgcgaggccgtgcgcgactcgtgcgagccggtcatgcagttcttcggcttctactggcccgagatgcttaagtgtgacaagttcccggagggggacgtctgcatcgccatgacgccgcccaatgccaccgaagcctccaagccccaaggcacaacggtgtgtcctccctgtgacaacgagttgaaatctgaggccatcattgaacatctctgtgccagcgagtttgcactgaggatgaaaataaaagaagtgaaaaaagaaaatggcgacaagaagattgtccccaagaagaagaagcccctgaagttggggcccatcaagaagaaggacctgaagaagcttgtgctgtacctgaagaatggggctgactgtccctgccaccagctggacaacctcagccaccacttcctcatcatgggccgcaaggtgaagagccagtacttgctgacggccatccacaagtgggacaagaaaaacaaggagttcaaaaacttcatgaagaaaatgaaaaaccatgagtgccccacctttcagtccgtgtttaagtgattctcccgggggcagggtggggagggagcctcgggtggggtgggagcgggggggacagtgcccgggaacccgtggtcacacacacgcactgccctgtcagtagtggacattgtaatccagtcggcttgttcttgcagcattcccgctccctttccctccatagccacgctccaaaccccagggtagccatggccgggtaaagcaagggccatttagattaggaaggtttttaagatccgcaatgtggagcagcagccactgcacaggaggaggtgacaaaccatttccaacagcaacacagccactaaaacacaaaaagggggattgggcggaaagtgagagccagcagcaaaaactacattttgcaacttgttggtgtggatctattggctgatctatgcctttcaactagaaaattctaatgattggcaagtcacgttgttttcaggtccagagtagtttctttctgtctgctttaaatggaaacagactcataccacacttacaattaaggtcaagcccagaaagtgataagtgcagggaggaaaagtgcaagtccattatctaatagtgacagcaaagggaccaggggagaggcattgccttctctgcccacagtctttccgtgtgattgtctttgaatctgaatcagccagtctcagatgccccaaagtttcggttcctatgagcccggggcatgatctgatccccaagacatgtggaggggcagcctgtgcctgcctttgtgtcagaaaaaggaaaccacagtgagcctgagagagacggcgattttcgggctgagaaggcagtagttttcaaaacacatagttaaaaaagaaacaaatgaaaaaaattttagaacagtccagcaaattgctagtcagggtgaattgtgaaattgggtgaagagcttaggattctaatctcatgttttttccttttcacatttttaaaagaacaatgacaaacacccacttatttttcaaggttttaaaacagtctacattgagcatttgaaaggtgtgctagaacaaggtctcctgatccgtccgaggctgcttcccagaggagcagctctccccaggcatttgccaagggaggcggatttccctggtagtgtagctgtgtggctttccttcctgaagagtccgtggttgccctagaacctaacaccccctagcaaaactcacagagctttccgtttttttctttcctgtaaagaaacatttcctttgaacttgattgcctatggatcaaagaaattcagaacagcctgcctgttcccccgcactttttacatatatttgtttcatttctgcagatggaaagttgacatgggtggggtgtccccatccagcgagagagtttcaaaagcaaaacatctctgcagtttttcccaagtaccctgagatacttcccaaagcccttatgtttaatcagcgatgtatataagccagttcacttagacaactttacccttcttgtccaatgtacaggaagtagttctaaaaaaaatgcatattaatttcttcccccaaagccggattcttaattctctgcaacactttgaggacatttatgattgtccctctgggccaatgcttatacccagtgaggatgctgcagtgaggctgtaaagtggccccctgcggccctagcctgacccggagaaaggatggtagattctgttaactcttgaagactccagtatgaaaatcagcatgcccgcctagttacctaccggagagttatcctgataaattaacctctcacagttagtgatcctgtccttttaacaccttttttgtggggttctctctgacctttcatcgtaaagtgctggggaccttaagtgatttgcctgtaattttggatgattaaaaaatgtgtatatatattagctaattagaaatattctacttctctgttgtcaaactgaaattcagagcaagttcctgagtgcgtggatctgggtcttagttctggttgattcactcaagagttcagtgctcatacgtatctgctcattttgacaaagtgcctcatgcaaccgggccctctctctgcggcagagtccttagtggaggggtttacctggaacataagtagttaccacagaatacggaagagcaggtgactgtgctgtgcagctctctaaatgggaattctcaggtaggaagcaacagcttcagaaagagctcaaaataaattggaaatgtgaatcgcagctgtgggttttaccaccgtctgtctcagagtcccaggaccttgagtgtcattagttactttattgaaggttttagacccatagcagctttgtctctgtcacatcagcaatttcagaaccaaaagggaggctctctgtaggcacagagctgcactatcacgagcctttgtttttctccacaaagtatctaacaaaaccaatgtgcagactgattggcctggtcattggtctccgagagaggaggtttgcctgtgatttgcctgtgatttcctaattatcgctagggccaaggtgggatttgtaaagctttacaataatcattctggatagagtcctgggaggtccttggcagaactcagttaaatctttgaagaatatttgtagttatcttagaagatagcatgggaggtgaggattccaaaaacattttatttttaaaatatcctgtgtaacacttggctcttggtacctgtgggttagcatcaagttctccccagggtagaattcaatcagagctccagtttgcatttggatgtgtaaattacagtaatcccatttcccaaacctaaaatctgtttttctcatcagactctgagtaactggttgctgtgtcataacttcatagatgcaggaggctcaggtgatctgtttgaggagagcaccctaggcagcctgcagggaataacatactggccgttctgacctgttgccagcagatacacaggacatggatgaaattcccgtttcctctagtttcttcctgtagtactcctcttttagatcctaagtctcttacaaaagctttgaatactgtgaaaatgttttacattccatttcatttgtgttgtttttttaactgcattttaccagatgttttgatgttatcgcttatgttaatagtaattcccgtacgtgttcattttattttcatgctttttcagccatgtatcaatattcacttgactaaaatcactcaattaatcaatgaaaaaaaaaaa

SEQ ID NO: 16 - DNA, 790 bp, Homo sapiens
agagtggactgagcagccagtaggggagagagcagttaaggcacacagagcaccagctccctcctgcctgaagatgttccaccaaatttgggcagctctgctctacttctatggtattatccttaactccatctaccagtgccctgagcacagtcaactgacaactctgggcgtggatgggaaggagttcccagaggtccacttgggccagtggtactttatcgcaggggcagctcccaccaaggaggagttggcaacttttgaccctgtggacaacattgtcttcaatatggctgctggctctgccccgatgcagctccaccttcgtgctaccatccgcatgaaagatgggctctgtgtgccccggaaatggatctaccacctgactgaagggagcacagatctcagaactgaaggccgccctgacatgaagactgagctcttttccagctcatgcccaggtggaatcatgctgaatgagacaggccagggttaccagcgctttctcctctacaatcgctcaccacatcctcccgaaaagtgtgtggaggaattcaagtccctgacttcctgcctggactccaaagccttcttattgactcctaggaatcaagaggcctgtgagctgtccaataactgacctgtaacttcatctaagtccccagatgggtacaatgggagctgagttgttggagggagaagctggagacttccagctccagctcccactcaagataataaagataatttttcaatcctcaaaaaaaaaaaaaaaaaaaaaaaaaaaaaa

SEQ ID NO: 17 - DNA, 1623 bp, Homo sapiens
gctgtgcagtccgacgccgactgaggcacgagcgggtgacgctgggcctgcagcgcggagcagaaagcagaacccgcagagtcctccctgctgctgtgtggacgacacgtgggcacaggcagaagtgggccctgtgaccagctgcactggtttcgtggaaggaagctccaggactggcgggatgggctcagcctgtatcaaagtcaccaaatactttctcttcctcttcaacttgatcttctttatcctgggcgcagtgatcctgggcttcggggtgtggatcctggccgacaagagcagtttcatctctgtcctgcaaacctcctccagctcgcttaggatgggggcctatgtcttcatcggcgtgggggcagtcactatgctcatgggcttcctgggctgcatcggcgccgtcaacgaggtccgctgcctgctggggctgtactttgctttcctgctcctgatcctcattgcccaggtgacggccggggccctcttctacttcaacatgggcaagctgaagcaggagatgggcggcatcgtgactgagctcattcgagactacaacagcagtcgcgaggacagcctgcaggatgcctgggactacgtgcaggctcaggtgaagtgctgcggctgggtcagcttctacaactggacagacaacgctgagctcatgaatcgccctgaggtcacctacccctgttcctgcgaagtcaagggggaagaggacaacagcctttctgtgaggaagggcttctgcgaggcccccggcaacaggacccagagtggcaaccaccctgaggactggcctgtgtaccaggagggctgcatggagaaggtgcaggcgtggctgcaggagaacctgggcatcatcctcggcgtgggcgtgggtgtggccatcatcgagctcctggggatggtcctgtccatctgcttgtgccggcacgtccattccgaagactacagcaaggtccccaagtactgaggcagctgctatccccatctccctgcctggcccccaacctcagggctcccaggggtctccctggctccctcctccaggcctgcctcccacttcactgcgaagaccctcttgcccaccctgactgaaagtagggggctttctggggcctagcgatctctcctggcctatccgctgccagccttgagccctggctgttctgtggttcctctgctcaccgcccatcagggttctcttatcaactcagagaaaaatgctccccacagcgtccctggcgcaggtgggctggacttctacctgccctcaagggtgtgtatattgtataggggcaactgtatgaaaaattggggaggagggggccgggcgcggtgctcacgcctgtaatcccagcactttgggaggccgaggcgggtggatcacgaggtcaggagatcgagaccatcctggctaacatggtgaaaccccgtctctactaaaaatacaaaaaaaatttagccgggcgcggtggcgggcacctgtagtcccagctacttgggaggctgaggcaggagaatggtgtgaacccgggagcggaggttgcagtgagctgagatcgtgctactgcactccagcctgggggacagaaagagactccgtctcaa

SEQ ID NO: 18 - DNA, 1070 bp, Homo sapiens
aaatgcacaacccggacggaagtgcctctccgacagcagatccaggctcggagctccagacgctgggacaggccgcccgcagaccacccccgccgcgcgcgggacacgacgccccccgcaggacacgcccatcagcccggaaacccctgagctgcttctcccggaggccgatgcccacccgggagcccccaaagactcgcggctcccgggggcacctgcatactcacccgcctgggcctgggcccccgctgcagggactggcgccccgaggcctcaaaaccagcgccccccgccctccgtgccagccccagccgggaccccacaaggcaaagaccaagaagattgtgtttgaggatgagttgctctcccaggccctcctgggcgccaagaagcctattggagccatccctaaggggcataagcctaggccccacccagtgcccgactatgagcttaagtacccgccagtgagcagtgagagggaacggagccgctatgtcgcagtgttccaggaccagtacggagagttcttggagctccagcacgaggtggggtgtgcacaggcaaagctcaggcagctggaggccctgctgagctccctgcccccaccccaaagccagaaggaggcccaagttgcagcccgggtttggagggagtttgagatgaagcgaatggatcctggcttcctggacaagcaggctcgctgccactacctgaagggtaaactgaggcatctcaagactcagatccagaaattcgatgaccaaggagacagcgagggctccgtgtacttctaagtgcccctgcagatgggcagagggatgcatggggatgcaggtcccttgcatttcttggtatctctcagcttttcctcttgcagctccccctaccaggggtcgctttctcctggattgcaaatgcctcttcagtttggactcagctctgacagcccctcctccaggaaggccttccaggacttcctcctctgggtcctctagctctgaccctacagggactccagatctcaacctgttccctggaagtagggcctgctctccatcccagtgaaa

SEQ ID NO: 19 - DNA, 3207 bp, Homo sapiens
cccacgcgtccgcccacgcgtccgcttacattttatgtgtttttttaaattctgcactttgacagtggtagcaaaataaaagtaatccaaaagttatttttctattgagaagagagaagaggtgggttttatttttttccttttgattccaatcttttctcccagtgacaaagcataaatcatggacaccagagaataaggtggacctcaggaatccggaaaagactgagaagcttacattcttcctctagagggaagagtggggtgtttatagccatctctggaacctaaaacaaaaaacatgagttgtgtgccatggaaaggagacaaggccaaatctgaatcattggagctgccccaggcagcacccccacaaatctaccatgagaaacagcgcagggagctttgtgccctccacgccctcaataacgtcttccaggacagcaatgccttcacccgggatacgctgcaagagattttccagaggttgtctccaaacaccatggtgacacctcacaagaagagcatgctgggaaatggcaactacgatgtgaatgtcattatggcagcacttcagaccaaaggctatgaagctgtttggtgggacaagcgcagggatgtcggtgtcattgccctcactaacgtcatgggcttcatcatgaatctgccctccagcctatgctggggtccactgaaactgcccctcaaaaggcagcactggatctgtgttcgagaggtgggaggggcctactacaacctcgactccaaactcaagatgcccgagtggattggaggcgagagcgagctcaggaagtttctaaaacatcatttgcgaggaaagaactgtgaactcctgctggtggtaccagaagaggtagaggctcatcagagttggaggaccgatgtgtaacagttctgcccaacctccctctcgcctcagccccttcagtcctctgtgacgtgctgtggcctctacagtgggtctgcccttgccacttccccaaacatctcatcaagtttttccccttcagatctgacagtgcaataggacagacgtgtggactgttataagaactactcagtgttttgttcctgggcaaggaaggtaggagttctgtgcacttaaggccagtggtcacaaacccttgttttatttaagagacagaggagaaagtggagcggggagggaatcctagcttattttcccttttctatgaggacttgacacaggttctgctgagttgtcactgctgctccagactcacctagagatgctgcctccactttccatcctgtctgggtctgaaaacagtgggtctgcagatagtgcccacaaaccccatgtgactggtttgaaggacccagagcataaaggtctctcaggaaaccatgtccaaaaccctagcagcggtacagcatgctgtctccaacccttatccccaggtttaagggtggtttatggccatacgtggaggttttttgttgttgtttttgagactgagtttcactcttgttgcccaggctggagtgcaatggcaccatctcggctcactgcaacctccacctcctggttcaagcgattctcaggcctcagcttcccaagtagttgggattacaggcgcctgccaccacacctggctaattttgtatttttagtagagatggggtttctccatgttggtcaggctggtctcaaactcccgacctcaagtgatctgcccgccttggcctcccaaagtgctgggattacaggcgtgagccaccgcacccggcagagttttataatgaaaaattaactaatattctagtatgaagtgaggaggatactgaacaggatgtggctaaagccaacctgggacagccatggggtggcttggtttcttcactccagtgttgtccctaccatttcgcagcattgatttaggaggctctgggacaaaagagaagccaaagagcagttttcccagttcactcactctggcaaaatcaggaaaaaaaagtctgcttttgacatcaaattccactaatttggggcagcgttgggtgaggaaagtattgtgaagacaggcttcttggagtaggggcagccacaattcagtagacactctaggctcggaggctgccactgtagttgccaagctcaggttgggtggttctgtgctgtatggatggaataggacctgggctggtcatcttcatgtcgtttcctctctgtatcaatggaagttcaacccgcccctacctcttcagatagttgtaggccacttttctcttgtaactttggaaaacaaaagaggagaaataagtatcataccatatgcgtgtctccaaagtggatgtggttgcctcaaggcaggtggcaggcaggggtgacctgctggccctcagatcaatggtcgtggcaggtctgagagctgtcccactggccagacttctctccagcagcaaagccagcctggggcttgcatgttgatcctgagcaagcttaacggggtgaagctgggctttctcccccctgtgactggagtgcatgttgacaccagcactttttctgcacatgtatcttcaatccaacaaggccgtttttttaatgctgagtaacaggccaccaagcggctactgcgttatatcttctcagcaactggccgcagtctcttctgcaccattttctacaccagacctgcttggcaccacagggagctcttttcctgccctgcacaatgacattccaaccaccaccagccagacattacagccaaccttgctgattgtcacaagcaggaccttggggccactggcactgtcagatagtaagccatttcttgggtagaggaggaaactcctctccacaaatccacttgggcctgtgcaaatggcacttgaaagagtccccatgcacttggagtccatgagccaatgggatatgcaaagacgcttaaacatttcagggctggtttctctgttcatatccaattctggtgcttaggaacagggacccatgctgatgcccaagggcaaaaagccccacttcctttaaggaagtgaacaggcctgaccctgatgcccaataacgggcaaccctaggctttttgtttttcttgcttttattcctttttgttgttggccttgtgctgcgtttgtttacaaaagatgtattttgtttaaccaaatattaaaaatggaaaactccaaaaaaaaaaaaaaaaa

SEQ ID NO: 20 - DNA, 2105 bp, Homo sapiens
atggcagattttgggatctctgctggccagtttgtggcagtggtctgggataagtcatccccagtggaggctctgaaaggtctggtggataagcttcaagcgttaaccggcaatgagggccgcgtgtctgtggaaaacatcaagcagctgttgcaatgtttagtcccaggaagcaccactctgcacagtgctgagattttggctgaaatcgcccggatccttcggcctggtggatgtctttttctgaaggagccagtagagacagctgtagataacaatagcaaagtgaagacagcatctaagctgtgttcagccctgactctttctggtcttgtggaagtgaaagagctgcagcgggagcccctaacccctgaggaagtacagtctgttcgagaacaccttggtcatgaaagtgacaacctgctgtttgttcagatcacaggcaaaaaaccaaactttgaagtgggttcttctaggcagcttaagctttccatcaccaagaagtcttctccttcagtgaaacctgctgtggaccctgctgctgccaagctgtggaccctctcagccaacgatatggaggacgacagcatgtgcatcttctgtggatgtagtttaactcaccgttggcctcttgagcatgtggtcaggttgaacatgatgatcaaccaaaaggaggacagggtggacaccttctttaccctggactccaagtttcctctcgaagcctgcagtcactttagcttttcattagcagagaccacgactgtatcactcattgctttgaacactctccaggatctcattgactcagatgagctgctggatccagaagatttgaagaagccagatccagcttccctgcgggctgcttcttgtggggaagggaaaaagaggaaggcctgtaagaactgcacctgtggccttgctgaagaactggaaaaagagaagtcaagggaacagatgagctcccaacccaagtcagcttgtggaaactgctacctgggcgatgccttccgctgtgccagctgcccctaccttgggatgccagccttcaaacctggggaaaaggtgcttctgagtgatagcaatcttcatgatgcctaggaggttcctgacatgggacccatctgctcctccagccaactcctgtccctcacatcccaccatggtggctcctcccacctcctctggatttgttcactctgagatctgtttgcagagtgggtgcttagcagacagagtgaagctggctggggggcacagtggtgtgtagtgctgctgtgtatcaaaagaccaaggtattatgggacctggtttcagaatgggatgggtttcttcacctcatgttaagagaagggagtgtgtcctgaagaagcccttcttctgatgttaaaatgctgaccagaacgctcttgagcccaggcatcgttgagcattaacactctgtgacagagctgcagacccctgccttgagtctcatctcagcaatgctgccaccctcttgtctttcagagttgttagtttactccattctttgtgacacgagtcaagtggctcacaacctcctcagggcaccagaggactcactcactggttgctgtgatgatatccagtgtccctctgcccccttccatccccaaccacatttgactgtagcattgcatctgtgtcctgttgtcatttatgttaaccttcaggtattaaacttgctgcatatcttgacatatcttgagattctgcatgtcttgtaaagagaggggatgtgcatttgtgtgtgatgttggatagtcatccacgctcagtttggaccattggaggaacttagtgtcacgcacaaatggggctattcctacgcttagaatagggcttgtctgcccactttagaagagtccaggttggtgagcatttagagggaagcagggcagaactctgaacgacaatacgtctctctgagcagagacccctttgttcttgttatccacccatatggacttggaatcaatcttgccaaatatttggagagattgtgtggatttaagagacctggatttttatattttaccagtaaataaaagttttcattgatatctgtccttgaaacttga

SEQ ID NO: 21 - DNA, 1431 bp, Homo sapiens
cctgccgtgttgcgtagggcgcctgtgcttgaggttgggggttgcgtcgctctctggtaaaggcgtgcaggtgttggccgcggcctctgagctgggatgagccgtgctcccggtggaagcaagggagcccagccggagccatggccagtacagtggtagcagttggactgaccattgctgctgcaggatttgcaggccgttacgttttgcaagccatgaagcatatggagcctcaagtaaaacaagtttttcaaagcctaccaaaatctgccttcagtggtggctattatagaggtgggtttgaacccaaaatgacaaaacgggaagcagcattaatactaggtgtaagccctactgccaataaagggaaaataagagatgctcatcgacgaattatgcttttaaatcatcctgacaaaggaggatctccttatatagcagccaaaatcaatgaagctaaagatttactagaaggtcaagctaaaaaatgaagtaaatgtatgatgaattttaagttcgtattagtttatgtatatgagtactaagtttttataataaaatgcctcagagctacaattttaaaaaatgatttagcacaagctaaatctcaaagccttggtataattttcttgtttaaatttggggattttaaatcagattatagtttagaatatttgcgtattaattatgggcaagcacacaccttctgaatagaaatattgttcattactcatttagcagataatttgggacctatgtctacttttcaaggcaaagtgaagatgacagtccttgctctcagggagcccccactttaatgggagactgataaactggtaattagactgtgataaatagtatgatggaaattagcttaagctgtttaagtagggactcttcttattcggtggaaaggctgttccaggtacaggcaactggcctggcaacttggatacttggaaccttgtatttaaaagtgaatttaaccacaactgagacctaagaaattgacctaggggtgtgtgtgtgtgtgtattctatgtacatataaaccatttttatttcatgcattaaaaatagtatgataaagatttcagagtacaggtctggtacaatcacagttcattgcagcctcaacctcctgggtttaagcagtcctcccgcctcagcctcccaaagtactgggattacaggcatgagtatttacattgtattcagctagccccttaaaggtaatgaccatttataaattattccttcagttggctatttcttgacataatcaaacttctgcaattgttatgattaagcttaaaccctgttagcaaaactgaaaactgaaatgttctcaatatcaacatatttaatttggactctttagaatttatacactaataaatttaaatgatgtttaaaaaaaaaaaaaaaaaa

SEQ ID NO: 22 - DNA, 1379 bp, Homo sapiens
cctgccgtgttgcgtagggcgcctgtgcttgaggttgggggttgcgtcgctctctggtaaaggcgtgcaggtgttggccgcggcctctgagctgggatgagccgtgctcccggtggaagcaagggagcccagccggagccatggccgttacgttttgcaagccatgaagcatatggagcctcaagtaaaacaagtttttcaaagcctaccaaaatctgccttcagtggtggctattatagaggtgggtttgaacccaaaatgacaaaacgggaagcagcattaatactaggtgtaagccctactgccaataaagggaaaataagagatgctcatcgacgaattatgcttttaaatcatcctgacaaaggaggatctccttatatagcagccaaaatcaatgaagctaaagatttactagaaggtcaagctaaaaaatgaagtaaatgtatgatgaattttaagttcgtattagtttatgtatatgagtactaagtttttataataaaatgcctcagagctacaattttaaaaaatgatttagcacaagctaaatctcaaagccttggtataattttcttgtttaaatttggggattttaaatcagattatagtttagaatatttgcgtattaattatgggcaagcacacaccttctgaatagaaatattgttcattactcatttagcagataatttgggacctatgtctacttttcaaggcaaagtgaagatgacagtccttgctctcagggagcccccactttaatgggagactgataaactggtaattagactgtgataaatagtatgatggaaattagcttaagctgtttaagtagggactcttcttattcggtggaaaggctgttccaggtacaggcaactggcctggcaacttggatacttggaaccttgtatttaaaagtgaatttaaccacaactgagacctaagaaattgacctaggggtgtgtgtgtgtgtgtattctatgtacatataaaccatttttatttcatgcattaaaaatagtatgataaagatttcagagtacaggtctggtacaatcacagttcattgcagcctcaacctcctgggtttaagcagtcctcccgcctcagcctcccaaagtactgggattacaggcatgagtatttacattgtattcagctagccccttaaaggtaatgaccatttataaattattccttcagttggctatttcttgacataatcaaacttctgcaattgttatgattaagcttaaaccctgttagcaaaactgaaaactgaaatgttctcaatatcaacatatttaatttggactctttagaatttatacactaataaatttaaatgatgtttaaaaaaaaaaaaaaaaaa

SEQ ID NO: 23 - DNA, 1351 bp, Homo sapiens
cctgccgtgttgcgtagggcgcctgtgcttgaggttgggggttgcgtcgctctctggtaaaggcgtgcaggtgttggccgcggcctctgagctgggatgagccgtgctcccggtggaagcaagggagcccagccggagccatggccagtacagtggtagcagttggactgaccattgctgctgcaggatttgcaggccgttacgttttgcaagccatgaagcatatggagcctcaagtaaaacaagtttttcaaagcctaccaaaatctccctactgccaataaagggaaaataagagatgctcatcgacgaattatgcttttaaatcatcctgacaaaggaggatctccttatatagcagccaaaatcaatgaagctaaagatttactagaaggtcaagctaaaaaatgaagtaaatgtatgatgaattttaagttcgtattagtttatgtatatgagtactaagtttttataataaaatgcctcagagctacaattttaaaaaatgatttagcacaagctaaatctcaaagccttggtataattttcttgtttaaatttggggattttaaatcagattatagtttagaatatttgcgtattaattatgggcaagcacacaccttctgaatagaaatattgttcattactcatttagcagataatttgggacctatgtctacttttcaaggcaaagtgaagatgacagtccttgctctcagggagcccccactttaatgggagactgataaactggtaattagactgtgataaatagtatgatggaaattagcttaagctgtttaagtagggactcttcttattcggtggaaaggctgttccaggtacaggcaactggcctggcaacttggatacttggaaccttgtatttaaaagtgaatttaaccacaactgagacctaagaaattgacctaggggtgtgtgtgtgtgtgtattctatgtacatataaaccatttttatttcatgcattaaaaatagtatgataaagatttcagagtacaggtctggtacaatcacagttcattgcagcctcaacctcctgggtttaagcagtcctcccgcctcagcctcccaaagtactgggattacaggcatgagtatttacattgtattcagctagccccttaaaggtaatgaccatttataaattattccttcagttggctatttcttgacataatcaaacttctgcaattgttatgattaagcttaaaccctgttagcaaaactgaaaactgaaatgttctcaatatcaacatatttaatttggactctttagaatttatacactaataaatttaaatgatgtttaaaaaaaaaaaaaaaaaa

SEQ ID NO: 24 - DNA, 1376 bp, Homo sapiens
cctgccgtgttgcgtagggcgcctgtgcttgaggttgggggttgcgtcgctctctggtaaaggcgtgcaggtgttggccgcggcctctgagctgggatgagccgtgctcccggtggaagcaagggagcccagccggagccatggccagtacagtggtagcagttggactgaccattgctgctgcaggatttgcaggccgttacgttttgcaagccatgaagcatatggagcctcaagtaaaacaagtttttcaaagcctaccaaaatctgccttcagtggtggctattatagagccctactgccaataaagggaaaataagagatgctcatcgacgaattatgcttttaaatcatcctgacaaaggaggatctccttatatagcagccaaaatcaatgaagctaaagatttactagaaggtcaagctaaaaaatgaagtaaatgtatgatgaattttaagttcgtattagtttatgtatatgagtactaagtttttataataaaatgcctcagagctacaattttaaaaaatgatttagcacaagctaaatctcaaagccttggtataattttcttgtttaaatttggggattttaaatcagattatagtttagaatatttgcgtattaattatgggcaagcacacaccttctgaatagaaatattgttcattactcatttagcagataatttgggacctatgtctacttttcaaggcaaagtgaagatgacagtccttgctctcagggagcccccactttaatgggagactgataaactggtaattagactgtgataaatagtatgatggaaattagcttaagctgtttaagtagggactcttcttattcggtggaaaggctgttccaggtacaggcaactggcctggcaacttggatacttggaaccttgtatttaaaagtgaatttaaccacaactgagacctaagaaattgacctaggggtgtgtgtgtgtgtgtattctatgtacatataaaccatttttatttcatgcattaaaaatagtatgataaagatttcagagtacaggtctggtacaatcacagttcattgcagcctcaacctcctgggtttaagcagtcctcccgcctcagcctcccaaagtactgggattacaggcatgagtatttacattgtattcagctagccccttaaaggtaatgaccatttataaattattccttcagttggctatttcttgacataatcaaacttctgcaattgttatgattaagcttaaaccctgttagcaaaactgaaaactgaaatgttctcaatatcaacatatttaatttggactctttagaatttatacactaataaatttaaatgatgtttaaaaaaaaaaaaaaaaaa

SEQ ID NO: 25 - DNA, 3053 bp, Homo sapiens
ctcctcccctccccctccgccctcctccgctccgggccagcgcggcggcggcggcggcggcagcagcaggagcagccccggctgcgggtcgcgacggcggcggggcgccccctcccccgtgccggggcgcggcggagggatgtggggccttgcgggaggaaggcttttcggcatcttctcggccccggtgctggtggctgtggtgtgctgcgcccagagtgtgaacgatcccgggaacatgtcctttgtgaaggagacggtggacaagctgttgaaaggctacgacattcgcctaagacccgacttcgggggtcccccggtctgcgtggggatgaacatcgacatcgccagcatcgacatggtttccgaagtcaacatggattataccttaaccatgtattttcaacaatattggagagataaaaggctcgcctattctgggatccctctcaacctcacgcttgacaatcgagtggctgaccagctatgggtgcccgacacatatttcttaaatgacaaaaagtcatttgtgcatggagtgacagtgaaaaaccgcatgatccgtcttcaccctgatgggacagtgctgtatgggctcagaatcaccacgacagcagcatgcatgatggacctcaggagataccccctggacgagcagaactgcactctggaaattgaaagctatggctacaccacggatgacattgagttttactggcgaggcggggacaaggctgttaccggagtggaaaggattgagctcccgcagttctccatcgtggagcaccgtctggtctcgaggaatgttgtcttcgccacaggtgcctatcctcgactgtcactgagctttcggttgaagaggaacattggatacttcattcttcagacttatatgccctctatactgataacgattctgtcgtgggtgtccttctggatcaattatgatgcatctgctgctagagttgccctcgggatcacaactgtgctgacaatgacaaccatcaacacccaccttcgggagaccttgcccaaaatcccctatgtcaaagccattgacatgtaccttatgggctgcttcgtctttgtgttcctggcccttctggagtatgcctttgtcaactacattttctttggaagaggccctcaaaggcagaagaagcttgcagaaaagacagccaaggcaaagaatgaccgttcaaagagcgaaagcaaccgggtggatgctcatggaaatattctgttgacatcgctggaagttcacaatgaaatgaatgaggtctcaggcggcattggcgataccaggaattcagcaatatcctttgacaactcaggaatccagtacaggaaacagagcatgcctcgagaagggcatgggcgattcctgggggacagaagcctcccgcacaagaagacccatctacggaggaggtcttcacagctcaaaattaaaatacctgatctaaccgatgtgaatgccatagacagatggtccaggatcgtgtttccattcactttttctcttttcaacttagtttactggctgtactatgttaactgagtgactgtacttgatttttcaaagacttcatttaacactgagtgaaatattactctgcctgtcaagtttttatacctgtacacacacagacacacaagcagacacacacatatatacatacgcaattgtatatatatgtgaactttctcagcatatatataaaatacacgtgtatatgaggatgtatgtgtatatgtttatacacacaggagtcagtgcccatgtgtatggaagacaaatacacatacatatatacattttgcagctatggacaatttaccacaggatgcatattaaagaaagtcatagtttttttcttttttaattgaaagggacaagtatcatctaaatattatgccttgagaatgagggcgtgaaacacaatatcatccccaaatgtgtcttgtattatcataagttagatgttttagtttaaaaatcagaaagacattcttagttaatctttgaaaactcatacagtggtattgctagtttaaaatgagtcacttacttcatatcctctcgttcagtttagtaagcaaaggcttcttggcttctctggtgatggggtttgttttcatcgggcatacgttttctgcaatggtttagtggctggggtgagccactggcagtgtgcttacctgttgtctgaaacatagatagatcccacgttgatgtctgaacgaccgtcttttgaaaactcatcgggagtgaatggcatctcgttgtaagtactctaatatacagtgtgtagtttgtttctgttgttcacttggagtggatccagcttcactgtcatgtgcgaacacagtgacacgtttggccagtgacatttcaatcactgaaaatgtgctctacatctcgtatggatttctaggcctgatatccaacagaaagcatagacgtctcaggttattcgttactctaaggtaaaaccatctaggatgattttcccccttgcagttatgttatcattcttataacattgtatgttaatagaaaatatatttgcataatatgcatatatatgtatatttaccaagattttgtttcttacgcttgctatcatggcagcatgcgatgtcatattttcctttatgtgatgtaactactttctgttatctagaaattaagattgaagctaaaacacttctactgttcaatttcagaaactaagaatcatcctcatgcctttatttctgtatctgacatatttcataagcacatccaactactcctagactgactaggattctgcaggaacatgacccgtacacaccacgcgtcacccaacgacccatgaccgttctctgaggcaaaggagggcaacctgacagcaaacacagtcactgttggttccttctgatccacagcctcatcagtatttggactttttaaagctcgtagaaacaagacaaggtgcaccggtttcatagacgcaaccttaacttactatttagatgagatctttctaaagaaaaaaaaaaaaaaa

SEQ ID NO: 26 - DNA, 2970 bp, Homo sapiens
ctcggagagtaggggggacagcggatcccagcaggttaggccggaggaacagcgccatgtgctccgggctcctggagctcctgctgcccatctggctctcctggaccctggggacccgaggctctgagccccgcagtgtgaacgatcccgggaacatgtcctttgtgaaggagacggtggacaagctgttgaaaggctacgacattcgcctaagacccgacttcgggggtcccccggtctgcgtggggatgaacatcgacatcgccagcatcgacatggtttccgaagtcaacatggattataccttaaccatgtattttcaacaatattggagagataaaaggctcgcctattctgggatccctctcaacctcacgcttgacaatcgagtggctgaccagctatgggtgcccgacacatatttcttaaatgacaaaaagtcatttgtgcatggagtgacagtgaaaaaccgcatgatccgtcttcaccctgatgggacagtgctgtatgggctcagaatcaccacgacagcagcatgcatgatggacctcaggagataccccctggacgagcagaactgcactctggaaattgaaagctatggctacaccacggatgacattgagttttactggcgaggcggggacaaggctgttaccggagtggaaaggattgagctcccgcagttctccatcgtggagcaccgtctggtctcgaggaatgttgtcttcgccacaggtgcctatcctcgactgtcactgagctttcggttgaagaggaacattggatacttcattcttcagacttatatgccctctatactgataacgattctgtcgtgggtgtccttctggatcaattatgatgcatctgctgctagagttgccctcgggatcacaactgtgctgacaatgacaaccatcaacacccaccttcgggagaccttgcccaaaatcccctatgtcaaagccattgacatgtaccttatgggctgcttcgtctttgtgttcctggcccttctggagtatgcctttgtcaactacattttctttggaagaggccctcaaaggcagaagaagcttgcagaaaagacagccaaggcaaagaatgaccgttcaaagagcgaaagcaaccgggtggatgctcatggaaatattctgttgacatcgctggaagttcacaatgaaatgaatgaggtctcaggcggcattggcgataccaggaattcagcaatatcctttgacaactcaggaatccagtacaggaaacagagcatgcctcgagaagggcatgggcgattcctgggggacagaagcctcccgcacaagaagacccatctacggaggaggtcttcacagctcaaaattaaaatacctgatctaaccgatgtgaatgccatagacagatggtccaggatcgtgtttccattcactttttctcttttcaacttagtttactggctgtactatgttaactgagtgactgtacttgatttttcaaagacttcatttaacactgagtgaaatattactctgcctgtcaagtttttatacctgtacacacacagacacacaagcagacacacacatatatacatacgcaattgtatatatatgtgaactttctcagcatatatataaaatacacgtgtatatgaggatgtatgtgtatatgtttatacacacaggagtcagtgcccatgtgtatggaagacaaatacacatacatatatacattttgcagctatggacaatttaccacaggatgcatattaaagaaagtcatagtttttttcttttttaattgaaagggacaagtatcatctaaatattatgccttgagaatgagggcgtgaaacacaatatcatccccaaatgtgtcttgtattatcataagttagatgttttagtttaaaaatcagaaagacattcttagttaatctttgaaaactcatacagtggtattgctagtttaaaatgagtcacttacttcatatcctctcgttcagtttagtaagcaaaggcttcttggcttctctggtgatggggtttgttttcatcgggcatacgttttctgcaatggtttagtggctggggtgagccactggcagtgtgcttacctgttgtctgaaacatagatagatcccacgttgatgtctgaacgaccgtcttttgaaaactcatcgggagtgaatggcatctcgttgtaagtactctaatatacagtgtgtagtttgtttctgttgttcacttggagtggatccagcttcactgtcatgtgcgaacacagtgacacgtttggccagtgacatttcaatcactgaaaatgtgctctacatctcgtatggatttctaggcctgatatccaacagaaagcatagacgtctcaggttattcgttactctaaggtaaaaccatctaggatgattttcccccttgcagttatgttatcattcttataacattgtatgttaatagaaaatatatttgcataatatgcatatatatgtatatttaccaagattttgtttcttacgcttgctatcatggcagcatgcgatgtcatattttcctttatgtgatgtaactactttctgttatctagaaattaagattgaagctaaaacacttctactgttcaatttcagaaactaagaatcatcctcatgcctttatttctgtatctgacatatttcataagcacatccaactactcctagactgactaggattctgcaggaacatgacccgtacacaccacgcgtcacccaacgacccatgaccgttctctgaggcaaaggagggcaacctgacagcaaacacagtcactgttggttccttctgatccacagcctcatcagtatttggactttttaaagctcgtagaaacaagacaaggtgcaccggtttcatagacgcaaccttaacttactatttagatgagatctttctaaagaaaaaaaaaaaaaaa

SEQ ID NO: 27 - DNA, 2189 bp, Homo sapiens
agccgtggtggttatggctggcctgagcggcgcgcagatccccgacggggagttcaccgcggtcgtgtaccgcctcatccgcaatgcacgctacgccgaggcggtgcagctgctgggcggagaactgcagcggagccctaggagccgcgccggcctgtcgctgctaggctactgctactaccgcctgcaggagttcgcgctggcggccgagtgctatgagcagctgggccagctgcacccggaactggagcagtaccgcctgtaccaggcccaggccctatacaaggcctgcttttatgcggaggccacccgggtcgccttccttctcctggataaccccgcctaccacagccgggtcctccacctgcaagctgctatcaagtacagcgagggcgatctgccagggtccaggagcctggtagagcagctgccgagtagggaagggggagaggaaagtgggggcgagaatgagaccgatggccagatcaacctgggttgtttgctctacaacctggctttggcctattacagcagccgacagtatgcttcagcactgaagcatatcgctgagattattgagcgtggcatccgccagcaccctgagctaggtgtgggcatgaccactgagggcattgatgttcgcagtgttggcaacaccttagtcctccatcagactgctctggtggaagccttcaaccttaaggcagctatagaataccaactgagaaactatgaggcagctcaagaagccctcactgacatgccacccagggcagaggaagagttggaccctgtgaccctacacaaccaggcactaatgaacatggatgccaggcctacagaagggtttgaaaagctacagtttttgctccaacagaatccctttcctccagagacttttggcaacctgttgctgctctactgtaaatatgagtattttgacctggcagcagatgtcctggcagaaaatgcccatttgatttataagttcctcacaccctatctctatgacttcttggacgctgtgaccacttgccagacagctcctgaagaggctttcattaagcttgatgggctagcagggatgctgactgaggtcctccggaaacttaccatacaagtacaggaagcaagacacaatagagatgatgaagctatcaaaaaggcagtgaatgaatatgatgaaaccatggagaaatacattcctgtgttgatggctcaggcaaaaatctactggaatcttgaaaattatccaatggtggaaaagatcttccgcaaatctgtggaattctgtaacgaccatgatgtgtggaagttgaatgtggctcatgttctgttcatgcaggaaaacaaatacaaagaagccattggtttctatgaacccatagtcaagaagcattatgataacatcctgaatgtcagtgctattgtactggctaatctctgtgtttcctatattatgacaagtcaaaatgaagaagcagaggagttgatgaggaagattgaaaaggaggaagagcagctctcttatgatgacccagataagaaaatgtaccatctctgcattgtgaatttggtgataggaactctttattgtgccaaaggaaattatgactttggtatttctcgagttatcaaaagcttggaaccttacaacaaaaagctgggaacagacacctggtattatgccaaaagatgcttcctgtccttgttagaaaacatgtcaaaacacacaatcatgcttcgtgatagtgttattcaagaatgtgtccagtttctagaacactgtgaacttcatggcagaaacatacctgctgttattgaacaacccctggaagaagaaagaatgcatgttggaaagaatacagtcacatatgagtctaggcagttaaaagctttgatttatgagattataggatggaatatatagtaatagctgatagtggcatttatcaaatggctttgttatgtaaatttgcatcgctttatttaccctttggcatctttatatttgttacatgttgaactttgtacacttatgcattataaaaaaaaaagtagctaaaacttttgctgttaaatttcccagaaagtgacatattctaagaacttttaccccaggagttatgaaaaattccaaacttatgaggaatgtttatatcagaagttgtaatacgtttgtttccttt

SEQ ID NO: 28 - DNA, 3097 bp, Homo sapiens
ggcctactggggtgtatgtccgctggattgtgaggcccgggatctgggctccgccgtggtgcagaaatgctgtgccggctcggcggtcggtggctgcggccgctccctgccctgcagctttgggctagggacctgccgcttgcgccggttcctacgagcggcgccaagcgccccactctcccagtgtgggcagtggcaccagtctctgcagtacatgcgaacggctggtacgaggccctggccgcgtcttcgccggtgcgggttgcggaggaagtactgctcggcgtgcacgccgccacgggcctgccctggtggggcagcattctgctctccaccgtggccttacggggtgctgtcacgctgcctttggcagcctaccagcactacatcctggccaaggtggaaaatttgcagccagaaataaaaactattgccaggcatcttaaccaagaagttgcagttcgtgcaaatcagttggggtggtccaaaagagatgccaggctcacttatctaaagaatatgaggaggctaatttcagagctatatgtgcgagataactgccaccctttcaaagccactgtgttggtttggattcagcttccaatgtggatcttcatgtcttttgctctccggaatttaagcacgggggcagcacattcagaaggtttttctgttcaggaacagttagctactggtggaattctgtggtttcctgacctcactgcacctgactccacttggattctgcctatctctgttggcgtcatcaatttgttaatagtggagatttgtgctctacaaaaaattggaatgtctcgttttcagacgtatattacgtactttgtccgtgcaatgtcggtgttgatgataccaattgctgcaacggtaccctcatcaattgttctctactggttatgctccagcttcgtgggcctttcacagaatttgctgctgcgttctcctggatttcgccaactttgccgaataccatcgaccaagtcagattcagaaactccttataaagacatatttgctgcctttaataccaagttcatttcaagaaaatgacatattttccaataattttgaaacagttgcaggagtcactatcatctaaatgtatttagacttagaaattcagatgttacttgatttccttttatttaaaatcattaacttcatgaaatattgtaggttaagatgtaatccagaccaggcacagtggctcatgcctgtaatcccagcactttgggaggtcgaggtgggtggatcacctgaggtctggagtttgagaccagcctggccaacatggtgaaaccctgtctgtactaaaataacaaaaaaattagctgggcttagtggcaggtgcctgtaatcccagctacttgggaggctgaggcaggagaatcgcttgaacctggaatacagaggtttcagtgagctgagatcaccccattgcactccagcctggacaacaagagtgaaacgctatcaaagaaaaaaaaaagatgtaatccagatatatttgacagtaattaaaatcttttaaatgttataaatgcagtatgtttgtgaaagtattagaatagaaccaaagtgcctgtctctgtttataaagttacagtttgttagagctaccagaactttggagaatagggttagctactgaatgatggcaagttaaactaaacaatactgcatattactgttttgtaaaataagaggatcagtgagatgattcatgttttttttttttgagatggagtctcactgtgtcacccaggctggagtgcagtggcgcaatctcagctcactgcaacctccatctcccggattccagcgattttcctgcctcagcctccaagtatctgggattgcaggtgcacaccaccacgcccagctaatttttgtatttttggtagagatggggtttcaccatgttggacaggctggtctggaactgctgacctcaactaatccaccctccttggcctcccatagtgctgggattacaggcatgagccacctcacccagcatttttttttttttaatttttttaatgagacagagtctctctctgtcacctaggctggagtgcagtggcacgatctcggctcactgcaacctctgcctcccgtgttcaagcaattctcctacctcagcctactgggtagctgggactacaggggtgcaccaccatgcccagctaagttttgtatttttagtagagatgggatttcaccatgttggctaggctggtcttgaactcctggcctcaagtgatctgcccaccttggcctcccaaagtgctgggattacaggcgtgagccactgtgcccagctgagatgtttcttattattttggaggtggagaggattttagacctctttgagcatctgaaaaaaggctatatatgtatggttttctcttcagaaaaatcttaagactcacaatacggggacttccttgttaccaggaagattttctggcaattcctagttaataaatcttattctaatggaacatacattgatcttgagttaatgcgtggttgaaaaaaaaaagcgggggcaacttgaaatatatgcagtaaagtagtccatgcatacaagtccctaacatggtagatgatgttgcctcccggccctgctcagaaagaatacaaaaagtgtacattcctttttctataatttaagaagtctggaatacagagtgtaacactgtgtactgctagcacccaaagtggaaaatcttaagcattcagattgtttagtcaaagaagaaaaccagaagggcagttgcctattgaggtgattttaaacctgtttatttgtaaggattaagtaccctaataggcttaaactatgatagaggtttaatacagaaaaaattgacaggtattataaattgtggatccagttacttgcttatttaatttgtaaagaggtaaaattagctctggttgagatatcaagtatggcaggtatttgagaaggctataaatcataattttcatttagttaaaatatggacctgattctgggaaaccctatcattccatctcaatgttttacaataaaataaaaactaaagtg

SEQ ID NO: 29 - DNA, 2227 bp, Homo sapiens
gaaccgccccgcgctgggaatttgcggcggcctccgccggggcagccgagctgaaccggtctcttcctcggaaaggcagggccgaggggcctgcggggcagccatggaggcgacgcggaggcggcagcacctgggagcgacgggcggcccaggcgcgcagctgggcgcctccttcctgcaggccaggcatggctctgtgagcgctgatgaggctgcccgcacggctcccttccacctcgacctctggttctacttcacactgcagaactgggttctggactttgggcgtcccattgccatgctggtattccctctcgagtggtttccactcaacaagcccagtgttggggactacttccacatggcctacaacgtcatcacgccctttctcttgctcaagctcatcgagcggtccccccgcaccctgccacgctccatcacgtacgtgagcatcatcatcttcatcatgggtgccagcatccacctggtgggtgactctgtcaaccaccgcctgctcttcagtggctaccagcaccacctgtctgtccgtgagaaccccatcatcaagaatctcaagccggagacgctgatcgactcctttgagctgctctactattatgatgagtacctgggtcactgcatgtggtacatccccttcttcctcatcctcttcatgtacttcagcggctgctttactgcctctaaagctgagagcttgattccagggcctgccctgctcctggtggcacccagtggcctgtactactggtacctggtcaccgagggccagatcttcatcctcttcatcttcaccttcttcgccatgctggccctcgtcctgcaccagaagcgcaagcgcctcttcctggacagcaacggcctcttcctcttctcctccttcgcactgaccctcttgcttgtggcgctctgggtcgcctggctgtggaatgaccctgttctcaggaagaagtacccgggtgtcatctacgtccctgagccctgggctttctacacccttcacgtcagcagtcggcactgagtccctggcaccaggctctggcgctctgctgggtgggagggtgggccatggagggcatctgaatacaggagtagggggggtgtgggtgtgtaaccagagaccgagagcatgagtggggtgtgcctcgtgtgcgtggattcgtgtgtgtgtgtgtgtcttgtatatgtgtgcgcagagtgcatcattttcagactctactatttccgtcaagtttctgtttgatttggatcatctcaggatcggattctgttttagagtgtttctgggccaggatccgggcccctgccctcctctgcacctgaccacactccctactcagggctagtctgttcttcccggacatcttctggtagccgtgcaggagagggctgggtggggcagaggccaggaggggacctggtgtgtcacctgcccaccacctggctcatccctcaggcccaccctgaccctacattacataggttacgtcagcctactgtggctgttgagcaaagcatttctcctttctgggcctcatttgcactagatgggcctgtggtcccaaagtaggtcagtaggttggggttgctgacaccccttgggtgcagctttgggacagatgagtggctctgtcctgtcactgccctctccctgcctgggggctatgtgcactccagacccctgcccaggctcaggcccatgaggtatggagacaccctggcccccaggagctggaggcaccgcccactcccctggcattccagctttgcaggtgaccctcctctacccaaagctctgtccccctgctcccactccagaagaactgcggcacgtgcttcgggcagcctagccacaggctttgagcgcctgcattcctgggggctggagggtggggtgccaaaggccctgagcaaaagccagagctcctctcatcaaagcctttacaaggtactgggcccagaggctttgccttgacagagtggcccagggtttcaagggaggaggaacctccccctacctaggacccttcctgtggggggtctacagagtcagggacagaagggaagggacccacaggaagtcacagtggtgcccagggatgtgtcagcccccagccacggggacgcgggattcaagaatgaagtaaatacagtcacagccccaaaaaaaaaaaaaaaaaaaaaaaaaaaaaaaaaaaaaaaaaaaaaa

SEQ ID NO: 30 - protein, 258 aa, Homo sapiens
MAEYSYVKSTKLVLKGTKTKSKKKKSKDKKRKREEDEETQLDIVGIWWTVTNFGEISGTIAIEMDKGTYIHALDNGLFTLGAPHKEVDEGPSPPEQFTAVKLSDSRIALKSGYGKYLGINSDGLVVGRSDAIGPREQWEPVFQNGKMALLASNSCFIRCNEAGDIEAKSKTAGEEEMIKIRSCAERETKKKDDIPEEDKGNVKQCEINYVKKFQSFQDHKLKISKEDSKILKKARKDGFLHETLLDRRAKLKADRYCK

SEQ ID NO: 31 - protein, 1440 aa, Homo sapiens
MEHTEIDHWLEFSATKLSSCDSFTSTINELNHCLSLRTYLVGNSLSLADLCVWATLKGNAAWQEQLKQKKAPVHVKRWFGFLEAQQAFQSVGTKWDVSTTKARVAPEKKQDVGKFVELPGAEMGKVTVRFPPEASGYLHIGHAKAALLNQHYQVNFKGKLIMRFDDTNPEKEKEDFEKVILEDVAMLHIKPDQFTYTSDHFETIMKYAEKLIQEGKAYVDDTPAEQMKAEREQRIESKHRKNPIEKNLQMWEEMKKGSQFGHSCCLRAKIDMSSNNGCMRDPTLYRCKIQPHPRTGNKYNVYPTYDFACPIVDSIEGVTHALRTTEYHDRDEQFYWIIEALGIRKPYIWEYSRLNLNNTVLSKRKLTWFVNEGLVDGWDDPRFPTVRGVLRRGMTVEGLKQFIAAQGSSRSVVNMEWDKIWAFNKKVIDPVAPRYVALLKKEVIPVNVPEAQEEMKEVAKHPKNPEVGLKPVWYSPKVFIEGADAETFSEGEMVTFINWGNLNITKIHKNADGKIISLDAKFNLENKDYKKTTKVTWLAETTHALPIPVICVTYEHLITKPVLGKDEDFKQYVNKNSKHEELMLGDPCLKDLKKGDIIQLQRRGFFICDQPYEPVSPYSCKEAPCVLIYIPDGHTKEMPTSGSKEKTKVEATKNETSAPFKERPTPSLNNNCTTSEDSLVLYNRVAVQGDVVRELKAKKAPKEDVDAAVKQLLSLKAEYKEKTGQEYKPGNPPAEIGQNISSNSSASILESKSLYDEVAAQGEVVRKLKAEKSPKAKINEAVECLLSLKAQYKEKTGKEYIPGQPPLSQSSDSSPTRNSEPAGLETPEAKVLFDKVASQGEVVRKLKTEKAPKDQVDIAVQELLQLKAQYKSLIGVEYKPVSATGAEDKDKKKKEKENKSEKQNKPQKQNDGQRKDPSKNQGGGLSSSGAGEGQGPKKQTRLGLEAKKEENLADWYSQVITKSEMIEYHDISGCYILRPWAYAIWEAIKDFFDAEIKKLGVENCYFPMFVSQSALEKEKTHVADFAPEVAWVTRSGKTELAEPIAIRPTSETVMYPAYAKWVQSHRDLPIKLNQWCNVVRWEFKHPQPFLRTREFLWQEGHSAFATMEEAAEEVLQILDLYAQVYEELLAIPVVKGRKTEKEKFAGGDYTTTIEAFISASGRAIQGGTSHHLGQNFSKMFEIVFEDPKIPGEKQFAYQNSWGLTTRTIGVMTMVHGDNMGLVLPPRVACVQVVIIPCGITNALSEEDKEALIAKCNDYRRRLLSVNIRVRADLRDNYSPGWKFNHWELKGVPIRLEVGPRDMKSCQFVAVRRDTGEKLTVAENEAETKLQAILEDIQVTLFTRASEDLKTHMVVANTMEDFQKILDSGKIVQIPFCGEIDCEDWIKKTTARDQDLEPGAPSMGAKSLCIPFKPLCELQPGAKCVCGKNPAKYYTLFGRSY

SEQ ID NO: 32 - protein, 140 aa, Homo sapiens
MAGWNAYIDNLMADGTCQDAAIVGYKDSPSVWAAVPGKTFVNITPAEVGVLVGKDRSSFYVNGLTLGGQKCSVIRDSLLQDGEFSMDLRTKSTGGAPTFNVTVTKTDKTLVLLMGKEGVHGGLINKKCYEMASHLRRSQY

SEQ ID NO: 33 - protein, 257 aa, Homo sapiens
MYEQLKGEWNRKSPNLSKCGEELGRLKLVLLELNFLPTTGTKLTKQQLILARDILEIGAQWSILRKDIPSFERYMAQLKCYYFDYKEQLPESAYMHQLLGLNLLFLLSQNRVAEFHTELERLPAKDIQTNVYIKHPVSLEQYLMEGSYNKVFLAKGNIPAESYTFFIDILLDTIRDEIAGCIEKAYEKILFTEATRILFFNTPKKMTDYAKKRGWVLGPNNYYSFASQQQKPEDTTIPSTELAKQVIEYARQLEMIV

SEQ ID NO: 34 - protein, 461 aa, Homo sapiens
MGPDRAAPLREPGPGSRHHRARDRLIHFGAVSTDVLGCSAHCSLTQSPKMNIQEQGFPLDLGASFTEDAPRPPVPGEEGELVSTDPRPASYSFCSGKGVGIKGETSTATPRRSDLDLGYEPEGSASPTPPYLKWAESLHSLLDDQDGISLFRTFLKQEGCADLLDFWFACTGFRKLEPCDSNEEKRLKLARAIYRKYILDNNGIVSRQTKPATKSFIKGCIMKQLIDPAMFDQAQTEIQATMEENTYPSFLKSDIYLEYTRTGSESPKVCSDQSSGSGTGKGISGYLPTLNEDEEWKCDQDMDEDDGRDAAPPGRLPQKLLLETAAPRVSSSRRYSEGREFRYGSWREPVNPYYVNAGYALAPATSANDSEQQSLSSDADTLSLTDSSVDGIPPYRIRKQHRREMQESVQVNGRVPLPHIPVSTGCRRRSAWSLRSSRRSSSTAWRLCSARGRPRRSWRSG

SEQ ID NO: 35 - protein, 862 aa, Homo sapiens
MNIQEQGFPLDLGASFTEDAPRPPVPGEEGELVSTDPRPASYSFCSGKGVGIKGETSTATPRRSDLDLGYEPEGSASPTPPYLKWAESLHSLLDDQDGISLFRTFLKQEGCADLLDFWFACTGFRKLEPCDSNEEKRLKLARAIYRKYILDNNGIVSRQTKPATKSFIKGCIMKQLIDPAMFDQAQTEIQATMEENTYPSFLKSDIYLEYTRTGSESPKVCSDQSSGSGTGKGISGYLPTLNEDEEWKCDQDMDEDDGRDAAPPGRLPQKLLLETAAPRVSSSRRYSEGREFRYGSWREPVNPYYVNAGYALAPATSANDSEQQSLSSDADTLSLTDSSVDGIPPYRIRKQHRREMQESVQVNGRVPLPHIPRTYRVPKEVRVEPQKFAEELIHRLEAVQRTREAEEKLEERLKRVRMEEEGEDGDPSSGPPGPCHKLPPAPAWHHFPPRCVDMGCAGLRDAHEENPESILDEHVQRVLRTPGRQSPGPGHRSPDSGHVAKMPVALGGAASGHGKHVPKSGAKLDAAGLHHHRHVHHHVHHSTARPKEQVEAEATRRAQSSFAWGLEPHSHGARSRGYSESVGAAPNASDGLAHSGKVGVACKRNAKKAESGKSASTEVPGASEDAEKNQKIMQWIIEGEKEISRHRRTGHGSSGTRKPQPHENSRPLSLEHPWAGPQLRTSVQPSHLFIQDPTMPPHPAPNPLTQLEEARRRLEEEEKRASRAPSKQRYVQEVMRRGRACVRPACAPVLHVVPAVSDMELSETETRSQRKVGGGSAQPCDSIVVAYYFCGEPIPYRTLVRGRAVTLGQFKELLTKKGSYRYYFKKVSDEFDCGVVFEEVREDEAVLPVFEEKIIGKVEKVD

SEQ ID NO: 36 - protein, 826 aa, Homo sapiens
MNIQEQGFPLDLGASFTEDAPRPPVPGEEGELVSTDPRPASYSFCSGKGVGIKGETSTATPRRSDLDLGYEPEGSASPTPPYLKWAESLHSLLDDQDGISLFRTFLKQEGCADLLDFWFACTGFRKLEPCDSNEEKRLKLARAIYRKYILDNNGIVSRQTKPATKSFIKGCIMKQLIDPAMFDQAQTEIQATMEENTYPSFLKSDIYLEYTRTGSESPKVCSDQSSGSGTGKGISGYLPTLNEDEEWKCDQDMDEDDGRDAAPPGRLPQKLLLETAAPRVSSSRRYSEGREFRYGSWREPVNPYYVNAGYALAPATSANDSEQQSLSSDADTLSLTDSSVDGIPPYRIRKQHRREMQESVQVNGRVPLPHIPRTYRVPKEVRVEPQKFAEELIHRLEAVQRTREAEEKLEERLKRVRMEEEGEDGDPSSGPPGPCHKLPPAPAWHHFPPRCVDMGCAGLRDAHEENPESILDEHVQRVLRTPGRQSPGPGHRSPDSGHVAKMPVALGGAASGHGKHVPKSGAKLDAAGLHHHRHVHHHVHHSTARPKEQVEAEATRRAQSSFAWGLEPHSHGARSRGYSESVGAAPNASDGLAHSGKVGVACKRNAKKAESGKSASTEVPGASEDAEKNQKIMQWIIEGEKEISRHRRTGHGSSGTRKPQPHENSRPLSLEHPWAGPQLRTSVQPSHLFIQDPTMPPHPAPNPLTQLEEARRRLEEEEKRASRAPSKQRTRSQRKVGGGSAQPCDSIVVAYYFCGEPIPYRTLVRGRAVTLGQFKELLTKKGSYRYYFKKVSDEFDCGVVFEEVREDEAVLPVFEEKIIGKVEKVD

SEQ ID NO: 37 - protein, 340 aa, Homo sapiens [sequence omitted]

SEQ ID NO: 38 - protein, 1670 aa, Homo sapiens
MSARTAPRPQVLLLPLLLVLLAAAPAASKGCVCKDKGQCFCDGAKGEKGEKGFPGPPGSPGQKGFTGPEGLPGPQGPKGFPGLPGLTGSKGVRGISGLPGFSGSPGLPGTPGNTGPYGLVGVPGCSGSKGEQGFPGLPGTPGYPGIPGAAGLKGQKGAPAKGEDIELDAKGDPGLPGAPGPQGLPGPPGFPGPVGPPGPPGFFGFPGAMGPRGPKGHMGERVIGHKGERGVKGLTGPPGPPGTVIVTLTGPDNRTDLKGEKGDKGAMGEPGPPGPSGLPGESYGSEKGAPGDPGLQGKPGKDGVPGFPGSEGVKGNRGFPGLMGEDGIKGQKGDIGPPGFRGPTEYYDTYQEKGDEGTPGPPGPRGARGPQGPSGPPGVPGSPGSSRPGLRGAPGWPGLKGSKGERGRPGKDAMGTPGSPGCAGSPGLPGSPGPPGPPGDIVFRKGPPGDHGLPGYLGSPGIPGVDGPKGEPGLLCTQCPYIPGPPGLPGLPGLHGVKGIPGRQGAAGLKGSPGSPGNTGLPGFPGFPGAQGDPGLKGEKGETLQPEGQVGVPGDPGLRGQPGRKGLDGIPGTLGVKGLPGPKGELALSGEKGDQGPPGDPGSPGSPGPAGPAGPPGYGPQGEPGLQGTQGVPGAPGPPGEAGPRGELSVSTPVPGPPGPPGPPGHPGPQGPPGIPGSLGKCGDPGLPGPDGEPGIPGIGFPGPPGPKGDQGFPGTKGSLGCPGKMGEPGLPGKPGLPGAKGEPAVAMPGGPGTPGFPGERGNSGEHGEIGLPGLPGLPGTPGNEGLDGPRGDPGQPGPPGEQGPPGRCIEGPRGAQGLPGLNGLKGQQGRRGKTGPKGDPGIPGLDRSGFPGETGSPGIPGHQGEMGPLGQRGYPGNPGILGPPGEDGVIGMMGFPGAIGPPGPPGNPGTPGQRGSPGIPGVKGQRGTPGAKGEQGDKGNPGPSEISHVIGDKGEPGLKGFAGNPGEKGNRGVPGMPGLKGLKGLPGPAGPPGPRGDLGSTGNPGEPGLRGIPGSMGNMGMPGSKGKRGTLGFPGRAGRPGLPGIHGLQGDKGEPGYSEGTRPGPPGPTGDPGLPGDMGKKGEMGQPGPPGHLGPAGPEGAPGSPGSPGLPGKPGPHGDLGFKGIKGLLGPPGIRGPPGLPGFPGSPGPMGIRGDQGRDGIPGPAGEKGETGLLRAPPGPRGNPGAQGAKGDRGAPGFPGLPGRKGAMGDAGPRGPTGIEGFPGPPGLPGAIIPGQTGNRGPPGSRGSPGAPGPPGPPGSHVIGIKGDKGSMGHPGPKGPPGTAGDMGPPGRLGAPGTPGLPGPRGDPGFQGFPGVKGEKGNPGFLGSIGPPGPIGPKGPPGVRGDPGTLKIISLPGSPGPPGTPGEPGMQGEPGPPGPPGNLGPCGPRGKPGKDGKPGTPGPAGEKGNKGSKGEPGPAGSDGLPGLKGKRGDSGSPATWTTRGFVFTRHSQTTAIPSCPEGTVPLYSGFSFLFVQGNQRAHGQDLGTLGSCLQRFTTMPFLFCNVNDVCNFASRNDYSYWLSTPALMPMNMAPITGRALEPYISRCTVCEGPAIAIAVHSQTTDIPPCPHGWISLWKGFSFIMFTSAGSEGTGQALASPGSCLEEFRASPFLECHGRGTCNYYSNSYSFWLASLNPERMFRKPIPSTVKAGELEKIISRCQVCMKKRH

SEQ ID NO: 39 - protein, 1642 aa, Homo sapiens
MSARTAPRPQVLLLPLLLVLLAAAPAASKGCVCKDKGQCFCDGAKGEKGEKGFPGPPGSPGQKGFTGPEGLPGPQGPKGFPGLPGLTGSKGVRGISGLPGFSGSPGLPGTPGNTGPYGLVGVPGCSGSKGEQGFPGLPGTPGYPGIPGAAGLKGQKGAPAKGEDIELDAKGDPGLPGAPGPQGLPGPPGFPGPVGPPGPPGFFGFPGAMGPRGPKGHMGERVIGHKGERGVKGLTGPPGPPGTVIVTLTGPDNRTDLKGEKGDKGAMGEPGPPGPSGLPGESYGSEKGAPGDPGLQGKPGKDGVPGFPGSEGVKGNRGFPGLMGEDGIKGQKGDIGPPGFRGPTEYYDTYQEKGDEGTPGPPGPRGARGPQGPSGPPGVPGSPGSSRPGLRGAPGWPGLKGSKGERGRPGKDAMGTPGSPGCAGSPGLPGSPGPPGPPGDIVFRKGPPGDHGLPGYLGSPGIPGVDGPKGEPGLLCTQCPYIPGPPGLPGLPGLHGVKGIPGRQGAAGLKGSPGSPGNTGLPGFPGFPGAQGDPGLKGEKGETLQPEGQVGVPGDPGLRGQPGRKGLDGIPGTLGVKGLPGPKGELALSGEKGDQGPPGDPGSPGSPGPAGPAGPPGYGPQGEPGLQGTQGVPGAPGPPGEAGPRGELSVSTPVPGPPGPPGPPGHPGPQGPPGIPGSLGKCGDPGLPGPDGEPGIPGIGFPGPPGPKGDQGFPGTKGSLGCPGKMGEPGLPGKPGLPGAKGEPAVAMPGGPGTPGFPGERGNSGEHGEIGLPGLPGLPGTPGNEGLDGPRGDPGQPGPPGEQGPPGRCIEGPRGAQGLPGLNGLKGQQGRRGKTGPKGDPGIPGLDRSGFPGETGSPGIPGHQGEMGPLGQRGYPGNPGILGPPGEDGVIGMMGFPGAIGPPGPPGNPGTPGQRGSPGIPGVKGQRGTPGAKGEQGDKGNPGPSEISHVIGDKGEPGLKGFAGNPGEKGNRGVPGMPGLKGLKGLPGPAGPPGPRGDLGSTGNPGEPGLRGIPGSMGNMGMPGSKGKRGTLGFPGRAGRPGLPGIHGLQGDKGEPGYSEGTRPGPPGPTGDPGLPGDMGKKGEMGQPGPPGHLGPAGPEGAPGSPGSPGLPGKPGPHGDLGFKGIKGLLGPPGIRGPPGLPGFPGSPGPMGIRGDQGRDGIPGPAGEKGETGLLRAPPGPRGNPGAQGAKGDRGAPGFPGLPGRKGAMGDAGPRGPTGIEGFPGPPGLPGAIIPGQTGNRGPPGSRGSPGAPGPPGPPGSHVIGIKGDKGSMGHPGPKGPPGTAGDMGPPGRLGAPGTPGLPGPRGDPGFQGFPGVKGEKGNPGFLGSIGPPGPIGPKGPPGVRGDPGTLKIISLPGSPGPPGTPGEPGMQGEPGPPGPPGNLGPCGPRGKPGKDGKPGTPGPAGEKGNKGSKGEPGPAGSDGLPGLKGKRGDSGSPATWTTRGFVFTRHSQTTAIPSCPEGTVPLYSGFSFLFVQGNQRAHGQDLGTLGSCLQRFTTMPFLFCNVNDVCNFASRNDYSYWLSTPALMPMNMAPITGIALEPYISRCTVCEGPAIAIAVHSQTTDIPPCPHGWISLWKGFSFIMKAYSINCESWGIRKNNKSLSGVHEEKTLKLKKTCRTAIFHPKEQSNDRTCCYLGIFL

SEQ ID NO: 40 - protein, 102 aa, Homo sapiens
MAGQAFRKFLPLFDRVLVERSAAETVTKGGIMLPEKSQGKVLQATVVAVGSGSKGKGGEIQPVSVKVGDKVLLPEYGGTKVVLDDKDYFLFRDGDILGKYVD

SEQ ID NO: 41 - protein, 302 aa, Homo sapiens
MALVASVRVPARVLLRAGARLPGAALGRTERAAGGGDGARPFGSQRVLVEPDAAAGVAVMKFKNPPVNSLSLEFLTELVISLEKLENDKSFRGVILTSDRPGVFSAGLDLTEMCGRSPAHYAGYWKAVQELWLRLYQSNLVLVSAINGACPAGGCLVALTCDYRILADNPRYCIGLNETQLGIIAPFWLKDTLENTIGHRAAERALQLGLLFPPAEALQVGIVDQVVPEEQVQSTALSAIAQWMAIPDHARQLTKAMMRKATASRLVTQRDADVQNFVSFISKDSIQKSLQMYLERLKEEKG

SEQ ID NO: 42 - protein, 200 aa, Homo sapiens
MGNSKSGALSKEILEELQLNTKFSEEELCSWYQSFLKDCPTGRITQQQFQSIYAKFFPDTDPKAYAQHVFRSFDSNLDGTLDFKEYVIALHMTTAGKTNQKLEWAFSLYDVDGNGTISKNEVLEIVMAIFKMITPEDVKLLPDDENTPEKRAEKIWKYFGKNDDDKLTEKEFIEGTLANKEILRLIQFEPQKVKEKMKNA

SEQ ID NO: 43 - protein, 313 aa, Homo sapiens
MGIGRSEGGRRGALGVLLALGAALLAVGSASEYDYVSFQSDIGPYQSGRFYTKPPQCVDIPADLRLCHNVGYKKMVLPNLLEHETMAEVKQQASSWVPLLNKNCHAGTQVFLCSLFAPVCLDRPIYPCRWLCEAVRDSCEPVMQFFGFYWPEMLKCDKFPEGDVCIAMTPPNATEASKPQGTTVCPPCDNELKSEAIIEHLCASEFALRMKIKEVKKENGDKKIVPKKKKPLKLGPIKKKDLKKLVLYLKNGADCPCHQLDNLSHHFLIMGRKVKSQYLLTAIHKWDKKNKEFKNFMKKMKNHECPTFQSVFK

SEQ ID NO: 44 - protein, 188 aa, Homo sapiens
MFHQIWAALLYFYGIILNSIYQCPEHSQLTTLGVDGKEFPEVHLGQWYFIAGAAPTKEELATFDPVDNIVFNMAAGSAPMQLHLRATIRMKDGLCVPRKWIYHLTEGSTDLRTEGRPDMKTELFSSSCPGGIMLNETGQGYQRFLLYNRSPHPPEKCVEEFKSLTSCLDSKAFLLTPRNQEACELSNN

SEQ ID NO: 45 - protein, 267 aa, Homo sapiens
MGSACIKVTKYFLFLFNLIFFILGAVILGFGVWILADKSSFISVLQTSSSSLRMGAYVFIGVGAVTMLMGFLGCIGAVNEVRCLLGLYFAFLLLILIAQVTAGALFYFNMGKLKQEMGGIVTELIRDYNSSREDSLQDAWDYVQAQVKCCGWVSFYNWTDNAELMNRPEVTYPCSCEVKGEEDNSLSVRKGFCEAPGNRTQSGNHPEDWPVYQEGCMEKVQAWLQENLGIILGVGVGVAIIELLGMVLSICLCRHVHSEDYSKVPKY

SEQ ID NO: 46 - protein, 264 aa, Homo sapiens
MHNPDGSASPTADPGSELQTLGQAARRPPPPRAGHDAPRRTRPSARKPLSCFSRRPMPTREPPKTRGSRGHLHTHPPGPGPPLQGLAPRGLKTSAPRPPCQPQPGPHKAKTKKIVFEDELLSQALLGAKKPIGAIPKGHKPRPHPVPDYELKYPPVSSERERSRYVAVFQDQYGEFLELQHEVGCAQAKLRQLEALLSSLPPPQSQKEAQVAARVWREFEMKRMDPGFLDKQARCHYLKGKLRHLKTQIQKFDDQGDSEGSVYF

SEQ ID NO: 47 - protein, 202 aa, Homo sapiens
MSCVPWKGDKAKSESLELPQAAPPQIYHEKQRRELCALHALNNVFQDSNAFTRDTLQEIFQRLSPNTMVTPHKKSMLGNGNYDVNVIMAALQTKGYEAVWWDKRRDVGVIALTNVMGFIMNLPSSLCWGPLKLPLKRQHWICVREVGGAYYNLDSKLKMPEWIGGESELRKFLKHHLRGKNCELLLVVPEEVEAHQSWRTDV

SEQ ID NO: 48 - protein, 367 aa, Homo sapiens
MADFGISAGQFVAVVWDKSSPVEALKGLVDKLQALTGNEGRVSVENIKQLLQCLVPGSTTLHSAEILAEIARILRPGGCLFLKEPVETAVDNNSKVKTASKLCSALTLSGLVEVKELQREPLTPEEVQSVREHLGHESDNLLFVQITGKKPNFEVGSSRQLKLSITKKSSPSVKPAVDPAAAKLWTLSANDMEDDSMCIFCGCSLTHRWPLEHVVRLNMMINQKEDRVDTFFTLDSKFPLEACSHFSFSLAETTTVSLIALNTLQDLIDSDELLDPEDLKKPDPASLRAASCGEGKKRKACKNCTCGLAEELEKEKSREQMSSQPKSACGNCYLGDAFRCASCPYLGMPAFKPGEKVLLSDSNLHDA

SEQ ID NO: 49 - protein, 116 aa, Homo sapiens
MASTVVAVGLTIAAAGFAGRYVLQAMKHMEPQVKQVFQSLPKSAFSGGYYRGGFEPKMTKREAALILGVSPTANKGKIRDAHRRIMLLNHPDKGGSPYIAAKINEAKDLLEGQAKK

SEQ ID NO: 50 - protein, 91 aa, Homo sapiens
MKHMEPQVKQVFQSLPKSAFSGGYYRGGFEPKMTKREAALILGVSPTANKGKIRDAHRRIMLLNHPDKGGSPYIAAKINEAKDLLEGQAKK

SEQ ID NO: 51 - protein, 47 aa, Homo sapiens
MASTVVAVGLTIAAAGFAGRYVLQAMKHMEPQVKQVFQSLPKSPYCQ

SEQ ID NO: 52 - protein, 59 aa, Homo sapiens
MASTVVAVGLTIAAAGFAGRYVLQAMKHMEPQVKQVFQSLPKSAFSGGYYRALLPIKGK

SEQ ID NO: 53 - protein, 473 aa, Homo sapiens [sequence omitted]

SEQ ID NO: 54 - protein, 473 aa, Homo sapiens
MCSGLLELLLPIWLSWTLGTRGSEPRSVNDPGNMSFVKETVDKLLKGYDIRLRPDFGGPPVCVGMNIDIASIDMVSEVNMDYTLTMYFQQYWRDKRLAYSGIPLNLTLDNRVADQLWVPDTYFLNDKKSFVHGVTVKNRMIRLHPDGTVLYGLRITTTAACMMDLRRYPLDEQNCTLEIESYGYTTDDIEFYWRGGDKAVTGVERIELPQFSIVEHRLVSRNVVFATGAYPRLSLSFRLKRNIGYFILQTYMPSILITILSWVSFWINYDASAARVALGITTVLTMTTINTHLRETLPKIPYVKAIDMYLMGCFVFVFLALLEYAFVNYIFFGRGPQRQKKLAEKTAKAKNDRSKSESNRVDAHGNILLTSLEVHNEMNEVSGGIGDTRNSAISFDNSGIQYRKQSMPREGHGRFLGDRSLPHKKTHLRRRSSQLKIKIPDLTDVNAIDRWSRIVFPFTFSLFNLVYWLYYVN

SEQ ID NO: 55 - protein, 638 aa, Homo sapiens
MAGLSGAQIPDGEFTAVVYRLIRNARYAEAVQLLGGELQRSPRSRAGLSLLGYCYYRLQEFALAAECYEQLGQLHPELEQYRLYQAQALYKACFYAEATRVAFLLLDNPAYHSRVLHLQAAIKYSEGDLPGSRSLVEQLPSREGGEESGGENETDGQINLGCLLYNLALAYYSSRQYASALKHIAEIIERGIRQHPELGVGMTTEGIDVRSVGNTLVLHQTALVEAFNLKAAIEYQLRNYEAAQEALTDMPPRAEEELDPVTLHNQALMNMDARPTEGFEKLQFLLQQNPFPPETFGNLLLLYCKYEYFDLAADVLAENAHLIYKFLTPYLYDFLDAVTTCQTAPEEAFIKLDGLAGMLTEVLRKLTIQVQEARHNRDDEAIKKAVNEYDETMEKYIPVLMAQAKIYWNLENYPMVEKIFRKSVEFCNDHDVWKLNVAHVLFMQENKYKEAIGFYEPIVKKHYDNILNVSAIVLANLCVSYIMTSQNEEAEELMRKIEKEEEQLSYDDPDKKMYHLCIVNLVIGTLYCAKGNYDFGISRVIKSLEPYNKKLGTDTWYYAKRCFLSLLENMSKHTIMLRDSVIQECVQFLEHCELHGRNIPAVIEQPLEEERMHVGKNTVTYESRQLKALIYEIIGWNI

SEQ ID NO: 56 - protein, 333 aa, Homo sapiens
MLCRLGGRWLRPLPALQLWARDLPLAPVPTSGAKRPTLPVWAVAPVSAVHANGWYEALAASSPVRVAEEVLLGVHAATGLPWWGSILLSTVALRGAVTLPLAAYQHYILAKVENLQPEIKTIARHLNQEVAVRANQLGWSKRDARLTYLKNMRRLISELYVRDNCHPFKATVLVWIQLPMWIFMSFALRNLSTGAAHSEGFSVQEQLATGGILWFPDLTAPDSTWILPISVGVINLLIVEICALQKIGMSRFQTYITYFVRAMSVLMIPIAATVPSSIVLYWLCSSFVGLSQNLLLRSPGFRQLCRIPSTKSDSETPYKDIFAAFNTKFISRK

SEQ ID NO: 57 - protein, 311 aa, Homo sapiens
MEATRRRQHLGATGGPGAQLGASFLQARHGSVSADEAARTAPFHLDLWFYFTLQNWVLDFGRPIAMLVFPLEWFPLNKPSVGDYFHMAYNVITPFLLLKLIERSPRTLPRSITYVSIIIFIMGASIHLVGDSVNHRLLFSGYQHHLSVRENPIIKNLKPETLIDSFELLYYYDEYLGHCMWYIPFFLILFMYFSGCFTASKAESLIPGPALLLVAPSGLYYWYLVTEGQIFILFIFTFFAMLALVLHQKRKRLFLDSNGLFLFSSFALTLLLVALWVAWLWNDPVLRKKYPGVIYVPEPWAFYTLHVSSRH

SEQ ID NO: 58 - DNA, 21 bp, Homo sapiens
aagtggaactctgagccattc

SEQ ID NO: 59 - RNA, 21 nt, RNAi-sense strand
guggaacucugagccauucuu

SEQ ID NO: 60 - RNA, 21 nt, RNAi-antisense strand
gaauggcucagaguuccacuu

SEQ ID NO: 61 - DNA, 21 bp, Homo sapiens
aactctgagccattcagcgtt

SEQ ID NO: 62 - RNA, 21 nt, RNAi-sense strand
cucugagccauucagcguuuu

SEQ ID NO: 63 - RNA, 21 nt, RNAi-antisense strand
aacgcugaauggcucagaguu

SEQ ID NO: 64 - DNA, 21 bp, Homo sapiens
aagtctaccaagctcgtgctc

SEQ ID NO: 65 - RNA, 21 nt, RNAi-sense strand
gucuaccaagcucgugcucuu

SEQ ID NO: 66 - RNA, 21 nt, RNAi-antisense strand
gagcacgagcuugguagacuu

SEQ ID NO: 67 - DNA, 21 bp, Homo sapiens
aaccaagacgaagagtaagaa

SEQ ID NO: 68 - RNA, 21 nt, RNAi-sense strand
ccaagacgaagaguaagaauu

SEQ ID NO: 69 - RNA, 21 nt, RNAi-antisense strand
uucuuacucuucgucuugguu

SEQ ID NO: 70 - DNA, 21 bp, Homo sapiens
aagacgaagagtaagaagaaa

SEQ ID NO: 71 - RNA, 21 nt, RNAi-sense strand
gacgaagaguaagaagaaauu

SEQ ID NO: 72 - RNA, 21 nt, RNAi-antisense strand
uuucuucuuacucuucgucuu

SEQ ID NO: 73 - DNA, 21 bp, Homo sapiens
aagagaagaagatgaagaaac

SEQ ID NO: 74 - RNA, 21 nt, RNAi-sense strand
gagaagaagaugaagaaacuu

SEQ ID NO: 75 - RNA, 21 nt, RNAi-antisense strand
guuucuucaucuucuucucuu

SEQ ID NO: 76 - DNA, 21 bp, Homo sapiens
aatctggtggacagtaacaaa

SEQ ID NO: 77 - RNA, 21 nt, RNAi-sense strand
ucugguggacaguaacaaauu

SEQ ID NO: 78 - RNA, 21 nt, RNAi-antisense strand
uuuguuacuguccaccagauu

SEQ ID NO: 79 - DNA, 21 bp, Homo sapiens
aaactttggtgaaatttcagg

SEQ ID NO: 80 - RNA, 21 nt, RNAi-sense strand
acuuuggugaaauuucagguu

SEQ ID NO: 81 - RNA, 21 nt, RNAi-antisense strand
ccugaaauuucaccaaaguuu

SEQ ID NO: 82 - DNA, 21 bp, Homo sapiens
aactttggtgaaatttcagga

SEQ ID NO: 83 - RNA, 21 nt, RNAi-sense strand
cuuuggugaaauuucaggauu

SEQ ID NO: 84 - RNA, 21 nt, RNAi-antisense strand
uccugaaauuucaccaaaguu

SEQ ID NO: 85 - DNA, 21 bp, Homo sapiens
aaatttcaggaaccatagcca

SEQ ID NO: 86 - RNA, 21 nt, RNAi-sense strand
auuucaggaaccauagccauu

SEQ ID NO: 87 - RNA, 21 nt, RNAi-antisense strand
uggcuaugguuccugaaauuu

SEQ ID NO: 88 - DNA, 21 bp, Homo sapiens
aatttcaggaaccatagccat

SEQ ID NO: 89 - RNA, 21 nt, RNAi-sense strand
uuucaggaaccauagccauuu

SEQ ID NO: 90 - RNA, 21 nt, RNAi-antisense strand
auggcuaugguuccugaaauu

SEQ ID NO: 91 - DNA, 21 bp, Homo sapiens
aaccatagccattgaaatgga

SEQ ID NO: 92 - RNA, 21 nt, RNAi-sense strand
ccauagccauugaaauggauu

SEQ ID NO: 93 - RNA, 21 nt, RNAi-antisense strand
uccauuucaauggcuaugguu

SEQ ID NO: 94 - DNA, 21 bp, Homo sapiens
aacctatatacatgcactcga

SEQ ID NO: 95 - RNA, 21 nt, RNAi-sense strand
ccuauauacaugcacucgauu

SEQ ID NO: 96 - RNA, 21 nt, RNAi-antisense strand
ucgagugcauguauauagguu

SEQ ID NO: 97 - DNA, 21 bp, Homo sapiens
aaattcagatggacttgttgt

SEQ ID NO: 98 - RNA, 21 nt, RNAi-sense strand
auucagauggacuuguuguuu

SEQ ID NO: 99 - RNA, 21 nt, RNAi-antisense strand
acaacaaguccaucugaauuu

SEQ ID NO: 100 - DNA, 21 bp, Homo sapiens
aattcagatggacttgttgtt

SEQ ID NO: 101 - RNA, 21 nt, RNAi-sense strand
uucagauggacuuguuguuuu

SEQ ID NO: 102 - RNA, 21 nt, RNAi-antisense strand
aacaacaaguccaucugaauu

SEQ ID NO: 103 - DNA, 21 bp, Homo sapiens
aattggaccaagagaacaatg

SEQ ID NO: 104 - RNA, 21 nt, RNAi-sense strand
uuggaccaagagaacaauguu

SEQ ID NO: 105 - RNA, 21 nt, RNAi-antisense strand
cauuguucucuugguccaauu

SEQ ID NO: 106 - DNA, 21 bp, Homo sapiens
aaatggctttgttggcctcaa

SEQ ID NO: 107 - RNA, 21 nt, RNAi-sense strand
auggcuuuguuggccucaauu

SEQ ID NO: 108 - RNA, 21 nt, RNAi-antisense strand
uugaggccaacaaagccauuu

SEQ ID NO: 109 - DNA, 21 bp, Homo sapiens
aatggctttgttggcctcaaa

SEQ ID NO: 110 - RNA, 21 nt, RNAi-sense strand
uggcuuuguuggccucaaauu

SEQ ID NO: 111 - RNA, 21 nt, RNAi-antisense strand
uuugaggccaacaaagccauu

SEQ ID NO: 112 - DNA, 21 bp, Homo sapiens
aatagctgctttattagatgc

SEQ ID NO: 113 - RNA, 21 nt, RNAi-sense strand
uagcugcuuuauuagaugcuu

SEQ ID NO: 114 - RNA, 21 nt, RNAi-antisense strand
gcaucuaauaaagcagcuauu

SEQ ID NO: 115 - DNA, 21 bp, Homo sapiens
aaacagcaggagaagaagaaa

SEQ ID NO: 116 - RNA, 21 nt, RNAi-sense strand
acagcaggagaagaagaaauu

SEQ ID NO: 117 - RNA, 21 nt, RNAi-antisense strand
uuucuucuucuccugcuguuu

SEQ ID NO: 118 - DNA, 21 bp, Homo sapiens
aacagcaggagaagaagaaat

SEQ ID NO: 119 - RNA, 21 nt, RNAi-sense strand
cagcaggagaagaagaaauuu

SEQ ID NO: 120 - RNA, 21 nt, RNAi-antisense strand
auuucuucuucuccugcuguu

SEQ ID NO: 121 - DNA, 21 bp, Homo sapiens
aatgatcaagattagatcctg

SEQ ID NO: 122 - RNA, 21 nt, RNAi-sense strand
ugaucaagauuagauccuguu

SEQ ID NO: 123 - RNA, 21 nt, RNAi-antisense strand
caggaucuaaucuugaucauu

SEQ ID NO: 124 - DNA, 21 bp, Homo sapiens
aagattagatcctgtgctgaa

SEQ ID NO: 125 - RNA, 21 nt, RNAi-sense strand
gauuagauccugugcugaauu

SEQ ID NO: 126 - RNA, 21 nt, RNAi-antisense strand
uucagcacaggaucuaaucuu

SEQ ID NO: 127 - DNA, 21 bp, Homo sapiens
aaagatgacattccagaagaa

SEQ ID NO: 128 - RNA, 21 nt, RNAi-sense strand
agaugacauuccagaagaauu

SEQ ID NO: 129 - RNA, 21 nt, RNAi-antisense strand
uucuucuggaaugucaucuuu

SEQ ID NO: 130 - DNA, 21 bp, Homo sapiens
aagatgacattccagaagaag

SEQ ID NO: 131 - RNA, 21 nt, RNAi-sense strand
gaugacauuccagaagaaguu

SEQ ID NO: 132 - RNA, 21 nt, RNAi-antisense strand
cuucuucuggaaugucaucuu

SEQ ID NO: 133 - DNA, 21 bp, Homo sapiens
aaagaaatttcagagcttcca

SEQ ID NO: 134 - RNA, 21 nt, RNAi-sense strand
agaaauuucagagcuuccauu

SEQ ID NO: 135 - RNA, 21 nt, RNAi-antisense strand
uggaagcucugaaauuucuuu

SEQ ID NO: 136 - DNA, 21 bp, Homo sapiens
aagaaatttcagagcttccaa

SEQ ID NO: 137 - RNA, 21 nt, RNAi-sense strand
gaaauuucagagcuuccaauu

SEQ ID NO: 138 - RNA, 21 nt, RNAi-antisense strand
uuggaagcucugaaauuucuu

SEQ ID NO: 139 - DNA, 21 bp, Homo sapiens
aaatttcagagcttccaagac

SEQ ID NO: 140 - RNA, 21 nt, RNAi-sense strand
auuucagagcuuccaagacuu

SEQ ID NO: 141 - RNA, 21 nt, RNAi-antisense strand
gucuuggaagcucugaaauuu

SEQ ID NO: 142 - DNA, 21 bp, Homo sapiens
aatttcagagcttccaagacc

SEQ ID NO: 143 - RNA, 21 nt, RNAi-sense strand
uuucagagcuuccaagaccuu

SEQ ID NO: 144 - RNA, 21 nt, RNAi-antisense strand
ggucuuggaagcucugaaauu

SEQ ID NO: 145 - DNA, 21 bp, Homo sapiens
aaaggctcggaaagatggatt

SEQ ID NO: 146 - RNA, 21 nt, RNAi-sense strand
aggcucggaaagauggauuuu

SEQ ID NO: 147 - RNA, 21 nt, RNAi-antisense strand
aauccaucuuuccgagccuuu

SEQ ID NO: 148 - DNA, 21 bp, Homo sapiens
aaggctcggaaagatggattt

SEQ ID NO: 149 - RNA, 21 nt, RNAi-sense strand
ggcucggaaagauggauuuuu

SEQ ID NO: 150 - RNA, 21 nt, RNAi-antisense strand
aaauccaucuuuccgagccuu

SEQ ID NO: 151 - DNA, 21 bp, Homo sapiens
aaattgaaagccgacagatac

SEQ ID NO: 152 - RNA, 21 nt, RNAi-sense strand
auugaaagccgacagauacuu

SEQ ID NO: 153 - RNA, 21 nt, RNAi-antisense strand
guaucugucggcuuucaauuu

SEQ ID NO: 154 - DNA, 21 bp, Homo sapiens
aattgaaagccgacagatact

SEQ ID NO: 155 - RNA, 21 nt, RNAi-sense strand
uugaaagccgacagauacuuu

SEQ ID NO: 156 - RNA, 21 nt, RNAi-antisense strand
aguaucugucggcuuucaauu

SEQ ID NO: 157 - DNA, 21 bp, Homo sapiens
aaagccgacagatactgcaag

SEQ ID NO: 158 - RNA, 21 nt, RNAi-sense strand
agccgacagauacugcaaguu

SEQ ID NO: 159 - RNA, 21 nt, RNAi-antisense strand
cuugcaguaucugucggcuuu

SEQ ID NO: 160 - DNA, 21 bp, Homo sapiens
aagccgacagatactgcaagt

SEQ ID NO: 161 - RNA, 21 nt, RNAi-sense strand
gccgacagauacugcaaguuu

SEQ ID NO: 162 - RNA, 21 nt, RNAi-antisense strand
acuugcaguaucugucggcuu

SEQ ID NO: 163 - DNA, 21 bp, Homo sapiens
cacatactcgtccagaaccgg

SEQ ID NO: 164 - RNA, 21 nt, RNAi-sense strand
cauacucguccagaaccgguu

SEQ ID NO: 165 - RNA, 21 nt, RNAi-antisense strand
ccgguucuggacgaguauguu

SEQ ID NO: 166 - DNA, 21 bp, Homo sapiens
catactcgtccagaaccggcc

SEQ ID NO: 167 - RNA, 21 nt, RNAi-sense strand
uacucguccagaaccggccuu

SEQ ID NO: 168 - RNA, 21 nt, RNAi-antisense strand
ggccgguucuggacgaguauu

SEQ ID NO: 169 - DNA, 21 bp, Homo sapiens
cagcctctccgcgcagaagtt

SEQ ID NO: 170 - RNA, 21 nt, RNAi-sense strand
gccucuccgcgcagaaguuuu

SEQ ID NO: 171 - RNA, 21 nt, RNAi-antisense strand
aacuucugcgcggagaggcuu

SEQ ID NO: 172 - DNA, 21 bp, Homo sapiens
catggccgagtactcctatgt

SEQ ID NO: 173 - RNA, 21 nt, RNAi-sense strand
uggccgaguacuccuauguuu

SEQ ID NO: 174 - RNA, 21 nt, RNAi-antisense strand
acauaggaguacucggccauu

SEQ ID NO: 175 - DNA, 21 bp, Homo sapiens
caagacgaagagtaagaagaa

SEQ ID NO: 176 - RNA, 21 nt, RNAi-sense strand
agacgaagaguaagaagaauu

SEQ ID NO: 177 - RNA, 21 nt, RNAi-antisense strand
uucuucuuacucuucgucuuu

SEQ ID NO: 178 - DNA, 21 bp, Homo sapiens
cagcttgatattgttggaatc

SEQ ID NO: 179 - RNA, 21 nt, RNAi-sense strand
gcuugauauuguuggaaucuu

SEQ ID NO: 180 - RNA, 21 nt, RNAi-antisense strand
gauuccaacaauaucaagcuu

SEQ ID NO: 181 - DNA, 21 bp, Homo sapiens
cagtaacaaactttggtgaaa

SEQ ID NO: 182 - RNA, 21 nt, RNAi-sense strand
guaacaaacuuuggugaaauu

SEQ ID NO: 183 - RNA, 21 nt, RNAi-antisense strand
uuucaccaaaguuuguuacuu

SEQ ID NO: 184 - DNA, 21 bp, Homo sapiens
caaactttggtgaaatttcag

SEQ ID NO: 185 - RNA, 21 nt, RNAi-sense strand
aacuuuggugaaauuucaguu

SEQ ID NO: 186 - RNA, 21 nt, RNAi-antisense strand
cugaaauuucaccaaaguuuu

SEQ ID NO: 187 - DNA, 21 bp, Homo sapiens
caggaaccatagccattgaaa

SEQ ID NO: 188 - RNA, 21 nt, RNAi-sense strand
ggaaccauagccauugaaauu

SEQ ID NO: 189 - RNA, 21 nt, RNAi-antisense strand
uuucaauggcuaugguuccuu

SEQ ID NO: 190 - DNA, 21 bp, Homo sapiens
catagccattgaaatggataa

SEQ ID NO: 191 - RNA, 21 nt, RNAi-sense strand
uagccauugaaauggauaauu

SEQ ID NO: 192 - RNA, 21 nt, RNAi-antisense strand
uuauccauuucaauggcuauu

SEQ ID NO: 193 - DNA, 21 bp, Homo sapiens
catgcactcgacaatggtctt

SEQ ID NO: 194 - RNA, 21 nt, RNAi-sense strand
ugcacucgacaauggucuuuu

SEQ ID NO: 195 - RNA, 21 nt, RNAi-antisense strand
aagaccauugucgagugcauu

SEQ ID NO: 196 - DNA, 21 bp, Homo sapiens
cacacaaagaagttgatgagg

SEQ ID NO: 197 - RNA, 21 nt, RNAi-sense strand
cacaaagaaguugaugagguu

SEQ ID NO: 198 - RNA, 21 nt, RNAi-antisense strand
ccucaucaacuucuuuguguu

SEQ ID NO: 199 - DNA, 21 bp, Homo sapiens
cagagcagtttacggctgtca

SEQ ID NO: 200 - RNA, 21 nt, RNAi-sense strand
gagcaguuuacggcugucauu

SEQ ID NO: 201 - RNA, 21 nt, RNAi-antisense strand
ugacagccguaaacugcucuu

SEQ ID NO: 202 - DNA, 21 bp, Homo sapiens
cagtttacggctgtcaaatta

SEQ ID NO: 203 - RNA, 21 nt, RNAi-sense strand
guuuacggcugucaaauuauu

SEQ ID NO: 204 - RNA, 21 nt, RNAi-antisense strand
uaauuugacagccguaaacuu

SEQ ID NO: 205 - DNA, 21 bp, Homo sapiens
cagatgcaattggaccaagag

SEQ ID NO: 206 - RNA, 21 nt, RNAi-sense strand
gaugcaauuggaccaagaguu

SEQ ID NO: 207 - RNA, 21 nt, RNAi-antisense strand
cucuugguccaauugcaucuu

SEQ ID NO: 208 - DNA, 21 bp, Homo sapiens
caattggaccaagagaacaat

SEQ ID NO: 209 - RNA, 21 nt, RNAi-sense strand
auuggaccaagagaacaauuu

SEQ ID NO: 210 - RNA, 21 nt, RNAi-antisense strand
auuguucucuugguccaauuu

SEQ ID NO: 211 - DNA, 21 bp, Homo sapiens
cagcaggagaagaagaaatga

SEQ ID NO: 212 - RNA, 21 nt, RNAi-sense strand
gcaggagaagaagaaaugauu

SEQ ID NO: 213 - RNA, 21 nt, RNAi-antisense strand
ucauuucuucuucuccugcuu

SEQ ID NO: 214 - DNA, 21 bp, Homo sapiens
caggagaagaagaaatgatca

SEQ ID NO: 215 - RNA, 21 nt, RNAi-sense strand
ggagaagaagaaaugaucauu

SEQ ID NO: 216 - RNA, 21 nt, RNAi-antisense strand
ugaucauuucuucuucuccuu

SEQ ID NO: 217 - DNA, 21 bp, Homo sapiens
caagattagatcctgtgctga

SEQ ID NO: 218 - RNA, 21 nt, RNAi-sense strand
agauuagauccugugcugauu

SEQ ID NO: 219 - RNA, 21 nt, RNAi-antisense strand
ucagcacaggaucuaaucuuu

SEQ ID NO: 220 - DNA, 21 bp, Homo sapiens
cattccagaagaagacaaagg

SEQ ID NO: 221 - RNA, 21 nt, RNAi-sense strand
uuccagaagaagacaaagguu

SEQ ID NO: 222 - RNA, 21 nt, RNAi-antisense strand
ccuuugucuucuucuggaauu

SEQ ID NO: 223 - DNA, 21 bp, Homo sapiens
cagaagaagacaaaggaaatg

SEQ ID NO: 224 - RNA, 21 nt, RNAi-sense strand
gaagaagacaaaggaaauguu

SEQ ID NO: 225 - RNA, 21 nt, RNAi-antisense strand
cauuuccuuugucuucuucuu

SEQ ID NO: 226 - DNA, 21 bp, Homo sapiens
cagagcttccaagaccacaaa

SEQ ID NO: 227 - RNA, 21 nt, RNAi-sense strand
gagcuuccaagaccacaaauu

SEQ ID NO: 228 - RNA, 21 nt, RNAi-antisense strand
uuuguggucuuggaagcucuu

SEQ ID NO: 229 - DNA, 21 bp, Homo sapiens
catgagacgcttctggacagg

SEQ ID NO: 230 - RNA, 21 nt, RNAi-sense strand
ugagacgcuucuggacagguu

SEQ ID NO: 231 - RNA, 21 nt, RNAi-antisense strand
ccuguccagaagcgucucauu

SEQ ID NO: 232 - DNA, 21 bp, Homo sapiens
caggagagccaaattgaaagc

SEQ ID NO: 233 - RNA, 21 nt, RNAi-sense strand
ggagagccaaauugaaagcuu

SEQ ID NO: 234 - RNA, 21 nt, RNAi-antisense strand
gcuuucaauuuggcucuccuu

SEQ ID NO: 235 - DNA, 21 bp, Homo sapiens
caaattgaaagccgacagata

SEQ ID NO: 236 - RNA, 21 nt, RNAi-sense strand
aauugaaagccgacagauauu

SEQ ID NO: 237 - RNA, 21 nt, RNAi-antisense strand
uaucugucggcuuucaauuuu

SEQ ID NO: 238 - DNA, 21 bp, Homo sapiens
gaagtggaactctgagccatt

SEQ ID NO: 239 - RNA, 21 nt, RNAi-sense strand
aguggaacucugagccauuuu

SEQ ID NO: 240 - RNA, 21 nt, RNAi-antisense strand
aauggcucagaguuccacuuu

SEQ ID NO: 241 - DNA, 21 bp, Homo sapiens
gaactctgagccattcagcgt

SEQ ID NO: 242 - RNA, 21 nt, RNAi-sense strand
acucugagccauucagcguuu

SEQ ID NO: 243 - RNA, 21 nt, RNAi-antisense strand
acgcugaauggcucagaguuu

SEQ ID NO: 244 - DNA, 21 bp, Homo sapiens
gagtgtttatttcgcgtccgc

SEQ ID NO: 245 - RNA, 21 nt, RNAi-sense strand
guguuuauuucgcguccgcuu

SEQ ID NO: 246 - RNA, 21 nt, RNAi-antisense strand
gcggacgcgaaauaaacacuu

SEQ ID NO: 247 - DNA, 21 bp, Homo sapiens
gactcacatactcgtccagaa

SEQ ID NO: 248 - RNA, 21 nt, RNAi-sense strand
cucacauacucguccagaauu

SEQ ID NO: 249 - RNA, 21 nt, RNAi-antisense strand
uucuggacgaguaugugaguu

SEQ ID NO: 250 - DNA, 21 bp, Homo sapiens
gagccatggccgagtactcct

SEQ ID NO: 251 - RNA, 21 nt, RNAi-sense strand
gccauggccgaguacuccuuu

SEQ ID NO: 252 - RNA, 21 nt, RNAi-antisense strand
aggaguacucggccauggcuu

SEQ ID NO: 253 - DNA, 21 bp, Homo sapiens
gagtactcctatgtgaagtct

SEQ ID NO: 254 - RNA, 21 nt, RNAi-sense strand
guacuccuaugugaagucuuu

SEQ ID NO: 255 - RNA, 21 nt, RNAi-antisense strand
agacuucacauaggaguacuu

SEQ ID NO: 256 - DNA, 21 bp, Homo sapiens
gaagtctaccaagctcgtgct

SEQ ID NO: 257 - RNA, 21 nt, RNAi-sense strand
agucuaccaagcucgugcuuu

SEQ ID NO: 258 - RNA, 21 nt, RNAi-antisense strand
agcacgagcuugguagacuuu

SEQ ID NO: 259 - DNA, 21 bp, Homo sapiens
gaaccaagacgaagagtaaga

SEQ ID NO: 260 - RNA, 21 nt, RNAi-sense strand
accaagacgaagaguaagauu

SEQ ID NO: 261 - RNA, 21 nt, RNAi-antisense strand
ucuuacucuucgucuugguuu

SEQ ID NO: 262 - DNA, 21 bp, Homo sapiens
gatattgttggaatctggtgg

SEQ ID NO: 263 - RNA, 21 nt, RNAi-sense strand
uauuguuggaaucuggugguu

SEQ ID NO: 264 - RNA, 21 nt, RNAi-antisense strand
ccaccagauuccaacaauauu

SEQ ID NO: 265 - DNA, 21 bp, Homo sapiens
gaatctggtggacagtaacaa

SEQ ID NO: 266 - RNA, 21 nt, RNAi-sense strand
aucugguggacaguaacaauu

SEQ ID NO: 267 - RNA, 21 nt, RNAi-antisense strand
uuguuacuguccaccagauuu

SEQ ID NO: 268 - DNA, 21 bp, Homo sapiens
gacagtaacaaactttggtga

SEQ ID NO: 269 - RNA, 21 nt, RNAi-sense strand
caguaacaaacuuuggugauu

SEQ ID NO: 270 - RNA, 21 nt, RNAi-antisense strand
ucaccaaaguuuguuacuguu

SEQ ID NO: 271 - DNA, 21 bp, Homo sapiens
gaaatttcaggaaccatagcc

SEQ ID NO: 272 - RNA, 21 nt, RNAi-sense strand
aauuucaggaaccauagccuu

SEQ ID NO: 273 - RNA, 21 nt, RNAi-antisense strand
ggcuaugguuccugaaauuuu

SEQ ID NO: 274 - DNA, 21 bp, Homo sapiens
gaaccatagccattgaaatgg

SEQ ID NO: 275 - RNA, 21 nt, RNAi-sense strand
accauagccauugaaaugguu

SEQ ID NO: 276 - RNA, 21 nt, RNAi-antisense strand
ccauuucaauggcuaugguuu

SEQ ID NO: 277 - DNA, 21 bp, Homo sapiens
gaacctatatacatgcactcg

SEQ ID NO: 278 - RNA, 21 nt, RNAi-sense strand
accuauauacaugcacucguu

SEQ ID NO: 279 - RNA, 21 nt, RNAi-antisense strand
cgagugcauguauauagguuu

SEQ ID NO: 280 - DNA, 21 bp, Homo sapiens
gagctccacacaaagaagttg

SEQ ID NO: 281 - RNA, 21 nt, RNAi-sense strand
gcuccacacaaagaaguuguu

SEQ ID NO: 282 - RNA, 21 nt, RNAi-antisense strand
caacuucuuuguguggagcuu

SEQ ID NO: 283 - DNA, 21 bp, Homo sapiens
gagcagtttacggctgtcaaa

SEQ ID NO: 284 - RNA, 21 nt, RNAi-sense strand
gcaguuuacggcugucaaauu

SEQ ID NO: 285 - RNA, 21 nt, RNAi-antisense strand
uuugacagccguaaacugcuu

SEQ ID NO: 286 - DNA, 21 bp, Homo sapiens
gatgcaattggaccaagagaa

SEQ ID NO: 287 - RNA, 21 nt, RNAi-sense strand
ugcaauuggaccaagagaauu

SEQ ID NO: 288 - RNA, 21 nt, RNAi-antisense strand
uucucuugguccaauugcauu

SEQ ID NO: 289 - DNA, 21 bp, Homo sapiens
gagaagaagaaatgatcaaga

SEQ ID NO: 290 - RNA, 21 nt, RNAi-sense strand
gaagaagaaaugaucaagauu

SEQ ID NO: 291 - RNA, 21 nt, RNAi-antisense strand
ucuugaucauuucuucuucuu

SEQ ID NO: 292 - DNA, 21 bp, Homo sapiens
gaaatgatcaagattagatcc

SEQ ID NO: 293 - RNA, 21 nt, RNAi-sense strand
aaugaucaagauuagauccuu

SEQ ID NO: 294 - RNA, 21 nt, RNAi-antisense strand
ggaucuaaucuugaucauuuu

SEQ ID NO: 295 - DNA, 21 bp, Homo sapiens
gatcaagattagatcctgtgc

SEQ ID NO: 296 - RNA, 21 nt, RNAi-sense strand
ucaagauuagauccugugcuu

SEQ ID NO: 297 - RNA, 21 nt, RNAi-antisense strand
gcacaggaucuaaucuugauu

SEQ ID NO: 298 - DNA, 21 bp, Homo sapiens
gattagatcctgtgctgaaag

SEQ ID NO: 299 - RNA, 21 nt, RNAi-sense strand
uuagauccugugcugaaaguu

SEQ ID NO: 300 - RNA, 21 nt, RNAi-antisense strand
cuuucagcacaggaucuaauu

SEQ ID NO: 301 - DNA, 21 bp, Homo sapiens
gatcctgtgctgaaagagaaa

SEQ ID NO: 302 - RNA, 21 nt, RNAi-sense strand
uccugugcugaaagagaaauu

SEQ ID NO: 303 - RNA, 21 nt, RNAi-antisense strand
uuucucuuucagcacaggauu

SEQ ID NO: 304 - DNA, 21 bp, Homo sapiens
gatgacattccagaagaagac

SEQ ID NO: 305 - RNA, 21 nt, RNAi-sense strand
ugacauuccagaagaagacuu

SEQ ID NO: 306 - RNA, 21 nt, RNAi-antisense strand
gucuucuucuggaaugucauu

SEQ ID NO: 307 - DNA, 21 bp, Homo sapiens
gacattccagaagaagacaaa

SEQ ID NO: 308 - RNA, 21 nt, RNAi-sense strand
cauuccagaagaagacaaauu

SEQ ID NO: 309 - RNA, 21 nt, RNAi-antisense strand
uuugucuucuucuggaauguu

SEQ ID NO: 310 - DNA, 21 bp, Homo sapiens
gaagaagacaaaggaaatgta

SEQ ID NO: 311 - RNA, 21 nt, RNAi-sense strand
agaagacaaaggaaauguauu

SEQ ID NO: 312 - RNA, 21 nt, RNAi-antisense strand
uacauuuccuuugucuucuuu

SEQ ID NO: 313 - DNA, 21 bp, Homo sapiens
gaaatttcagagcttccaaga

SEQ ID NO: 314 - RNA, 21 nt, RNAi-sense strand
aauuucagagcuuccaagauu

SEQ ID NO: 315 - RNA, 21 nt, RNAi-antisense strand
ucuuggaagcucugaaauuuu

SEQ ID NO: 316 - DNA, 21 bp, Homo sapiens
gagcttccaagaccacaaact

SEQ ID NO: 317 - RNA, 21 nt, RNAi-sense strand
gcuuccaagaccacaaacuuu

SEQ ID NO: 318 - RNA, 21 nt, RNAi-antisense strand
aguuuguggucuuggaagcuu

SEQ ID NO: 319 - DNA, 21 bp, Homo sapiens
gagacgcttctggacaggaga

SEQ ID NO: 320 - RNA, 21 nt, RNAi-sense strand
gacgcuucuggacaggagauu

SEQ ID NO: 321 - RNA, 21 nt, RNAi-antisense strand
ucuccuguccagaagcgucuu

SEQ ID NO: 322 - DNA, 21 bp, Homo sapiens
gacgcttctggacaggagagc

SEQ ID NO: 323 - RNA, 21 nt, RNAi-sense strand
cgcuucuggacaggagagcuu

SEQ ID NO: 324 - RNA, 21 nt, RNAi-antisense strand
gcucuccuguccagaagcguu

SEQ ID NO: 325 - DNA, 21 bp, Homo sapiens
gacaggagagccaaattgaaa

SEQ ID NO: 326 - RNA, 21 nt, RNAi-sense strand
caggagagccaaauugaaauu

SEQ ID NO: 327 - RNA, 21 nt, RNAi-antisense strand
uuucaauuuggcucuccuguu

SEQ ID NO: 328 - DNA, 21 bp, Homo sapiens
gagagccaaattgaaagccga

SEQ ID NO: 329 - RNA, 21 nt, RNAi-sense strand
gagccaaauugaaagccgauu

SEQ ID NO: 330 - RNA, 21 nt, RNAi-antisense strand
ucggcuuucaauuuggcucuu

SEQ ID NO: 331 - DNA, 21 bp, Homo sapiens
gagccaaattgaaagccgaca

SEQ ID NO: 332 - RNA, 21 nt, RNAi-sense strand
gccaaauugaaagccgacauu

SEQ ID NO: 333 - RNA, 21 nt, RNAi-antisense strand
ugucggcuuucaauuuggcuu

SEQ ID NO: 334 - DNA, 21 bp, Homo sapiens
gaaagccgacagatactgcaa

SEQ ID NO: 335 - RNA, 21 nt, RNAi-sense strand
aagccgacagauacugcaauu

SEQ ID NO: 336 - RNA, 21 nt, RNAi-antisense strand
uugcaguaucugucggcuuuu

SEQ ID NO: 337 - DNA, 21 bp, Homo sapiens
gacagatactgcaagtgactg

SEQ ID NO: 338 - RNA, 21 nt, RNAi-sense strand
cagauacugcaagugacuguu

SEQ ID NO: 339 - RNA, 21 nt, RNAi-antisense strand
cagucacuugcaguaucuguu

SEQ ID NO: 340 - DNA, 21 bp, Homo sapiens
tacagagacgtaggctgtcag

SEQ ID NO: 341 - RNA, 21 nt, RNAi-sense strand
cagagacguaggcugucaguu

SEQ ID NO: 342 - RNA, 21 nt, RNAi-antisense strand
cugacagccuacgucucuguu

SEQ ID NO: 343 - DNA, 21 bp, Homo sapiens
tatttcgcgtccgcttctgtt

SEQ ID NO: 344 - RNA, 21 nt, RNAi-sense strand
uuucgcguccgcuucuguuuu

SEQ ID NO: 345 - RNA, 21 nt, RNAi-antisense strand
aacagaagcggacgcgaaauu

SEQ ID NO: 346 - DNA, 21 bp, Homo sapiens
tactcgtccagaaccggcctc

SEQ ID NO: 347 - RNA, 21 nt, RNAi-sense strand
cucguccagaaccggccucuu

SEQ ID NO: 348 - RNA, 21 nt, RNAi-antisense strand
gaggccgguucuggacgaguu

SEQ ID NO: 349 - DNA, 21 bp, Homo sapiens
tactcctatgtgaagtctacc

SEQ ID NO: 350 - RNA, 21 nt, RNAi-sense strand
cuccuaugugaagucuaccuu

SEQ ID NO: 351 - RNA, 21 nt, RNAi-antisense strand
gguagacuucacauaggaguu

SEQ ID NO: 352 - DNA, 21 bp, Homo sapiens
tatgtgaagtctaccaagctc

SEQ ID NO: 353 - RNA, 21 nt, RNAi-sense strand
ugugaagucuaccaagcucuu

SEQ ID NO: 354 - RNA, 21 nt, RNAi-antisense strand
gagcuugguagacuucacauu

SEQ ID NO: 355 - DNA, 21 bp, Homo sapiens
tattgttggaatctggtggac

SEQ ID NO: 356 - RNA, 21 nt, RNAi-sense strand
uuguuggaaucugguggacuu

SEQ ID NO: 357 - RNA, 21 nt, RNAi-antisense strand
guccaccagauuccaacaauu

SEQ ID NO: 358 - DNA, 21 bp, Homo sapiens
tagccattgaaatggataagg

SEQ ID NO: 359 - RNA, 21 nt, RNAi-sense strand
gccauugaaauggauaagguu

SEQ ID NO: 360 - RNA, 21 nt, RNAi-antisense strand
ccuuauccauuucaauggcuu

SEQ ID NO: 361 - DNA, 21 bp, Homo sapiens
tatatacatgcactcgacaat

SEQ ID NO: 362 - RNA, 21 nt, RNAi-sense strand
uauacaugcacucgacaauuu

SEQ ID NO: 363 - RNA, 21 nt, RNAi-antisense strand
auugucgagugcauguauauu

SEQ ID NO: 364 - DNA, 21 bp, Homo sapiens
tatacatgcactcgacaatgg

SEQ ID NO: 365 - RNA, 21 nt, RNAi-sense strand
uacaugcacucgacaaugguu

SEQ ID NO: 366 - RNA, 21 nt, RNAi-antisense strand
ccauugucgagugcauguauu

SEQ ID NO: 367 - DNA, 21 bp, Homo sapiens
tacatgcactcgacaatggtc

SEQ ID NO: 368 - RNA, 21 nt, RNAi-sense strand
caugcacucgacaauggucuu

SEQ ID NO: 369 - RNA, 21 nt, RNAi-antisense strand
gaccauugucgagugcauguu

SEQ ID NO: 370 - DNA, 21 bp, Homo sapiens
tagtcctccagagcagtttac

SEQ ID NO: 371 - RNA, 21 nt, RNAi-sense strand
guccuccagagcaguuuacuu

SEQ ID NO: 372 - RNA, 21 nt, RNAi-antisense strand
guaaacugcucuggaggacuu

SEQ ID NO: 373 - DNA, 21 bp, Homo sapiens
tacggctgtcaaattatctga

SEQ ID NO: 374 - RNA, 21 nt, RNAi-sense strand
cggcugucaaauuaucugauu

SEQ ID NO: 375 - RNA, 21 nt, RNAi-antisense strand
ucagauaauuugacagccguu

SEQ ID NO: 376 - DNA, 21 bp, Homo sapiens
taaattcagatggacttgttg

SEQ ID NO: 377 - RNA, 21 nt, RNAi-sense strand
aauucagauggacuuguuguu

SEQ ID NO: 378 - RNA, 21 nt, RNAi-antisense strand
caacaaguccaucugaauuuu

SEQ ID NO: 379 - DNA, 21 bp, Homo sapiens
tagctgctttattagatgcaa

SEQ ID NO: 380 - RNA, 21 nt, RNAi-sense strand
gcugcuuuauuagaugcaauu

SEQ ID NO: 381 - RNA, 21 nt, RNAi-antisense strand
uugcaucuaauaaagcagcuu

SEQ ID NO: 382 - DNA, 21 bp, Homo sapiens
tattagatgcaatgaagcagg

SEQ ID NO: 383 - RNA, 21 nt, RNAi-sense strand
uuagaugcaaugaagcagguu

SEQ ID NO: 384 - RNA, 21 nt, RNAi-antisense strand
ccugcuucauugcaucuaauu

SEQ ID NO: 385 - DNA, 21 bp, Homo sapiens
tagatcctgtgctgaaagaga

SEQ ID NO: 386 - RNA, 21 nt, RNAi-sense strand
gauccugugcugaaagagauu

SEQ ID NO: 387 - RNA, 21 nt, RNAi-antisense strand
ucucuuucagcacaggaucuu

SEQ ID NO: 388 - DNA, 21 bp, Homo sapiens
taaagaaatttcagagcttcc

SEQ ID NO: 389 - RNA, 21 nt, RNAi-sense strand
aagaaauuucagagcuuccuu

SEQ ID NO: 390 - RNA, 21 nt, RNAi-antisense strand
ggaagcucugaaauuucuuuu

SEQ ID NO: 391 - DNA, 21 bp, Homo sapiens
aaattcagatggacttgttgt

SEQ ID NO: 392 - RNA, 21 nt, RNAi-sense strand
auucagauggacuuguuguuu

SEQ ID NO: 393 - RNA, 21 nt, RNAi-antisense strand
acaacaaguccaucugaauuu

SEQ ID NO: 394 - DNA, 21 bp, Homo sapiens
aaatggctttgttggcctcaa

SEQ ID NO: 395 - RNA, 21 nt, RNAi-sense strand
auggcuuuguuggccucaauu

SEQ ID NO: 396 - RNA, 21 nt, RNAi-antisense strand
uugaggccaacaaagccauuu

SEQ ID NO: 397 - DNA, 21 bp, Homo sapiens
aatggctttgttggcctcaaa

SEQ ID NO: 398 - RNA, 21 nt, RNAi-sense strand
uggcuuuguuggccucaaauu

SEQ ID NO: 399 - RNA, 21 nt, RNAi-antisense strand
uuugaggccaacaaagccauu

SEQ ID NO: 400 - DNA, 21 bp, Homo sapiens
aagattagatcctgtgctgaa

SEQ ID NO: 401 - RNA, 21 nt, RNAi-sense strand
gauuagauccugugcugaauu

SEQ ID NO: 402 - RNA, 21 nt, RNAi-antisense strand
uucagcacaggaucuaaucuu

SEQ ID NO: 403 - DNA, 21 bp, Homo sapiens
catgcactcgacaatggtctt

SEQ ID NO: 404 - RNA, 21 nt, RNAi-sense strand
ugcacucgacaauggucuuuu

SEQ ID NO: 405 - RNA, 21 nt, RNAi-antisense strand
aagaccauugucgagugcauu

SEQ ID NO: 406 - DNA, 21 bp, Homo sapiens
cagagcagtttacggctgtca

SEQ ID NO: 407 - RNA, 21 nt, RNAi-sense strand
gagcaguuuacggcugucauu

SEQ ID NO: 408 - RNA, 21 nt, RNAi-antisense strand
ugacagccguaaacugcucuu

SEQ ID NO: 409 - DNA, 21 bp, Homo sapiens
caagattagatcctgtgctga

SEQ ID NO: 410 - RNA, 21 nt, RNAi-sense strand
agauuagauccugugcugauu

SEQ ID NO: 411 - RNA, 21 nt, RNAi-antisense strand
ucagcacaggaucuaaucuuu

SEQ ID NO: 412 - DNA, 21 bp, Homo sapiens
gattagatcctgtgctgaaag

SEQ ID NO: 413 - RNA, 21 nt, RNAi-sense strand
uuagauccugugcugaaaguu

SEQ ID NO: 414 - RNA, 21 nt, RNAi-antisense strand
cuuucagcacaggaucuaauu

SEQ ID NO: 415 - DNA, 21 bp, Homo sapiens
aatctgatggaacatactgag

SEQ ID NO: 416 - RNA, 21 nt, RNAi-sense strand
ucugauggaacauacugaguu

SEQ ID NO: 417 - RNA, 21 nt, RNAi-antisense strand
cucaguauguuccaucagauu

SEQ ID NO: 418 - DNA, 21 bp, Homo sapiens
aacatactgagattgatcact

SEQ ID NO: 419 - RNA, 21 nt, RNAi-sense strand
cauacugagauugaucacuuu

SEQ ID NO: 420 - RNA, 21 nt, RNAi-antisense strand
agugaucaaucucaguauguu

SEQ ID NO: 421 - DNA, 21 bp, Homo sapiens
aatgaactcaatcattgcctg

SEQ ID NO: 422 - RNA, 21 nt, RNAi-sense strand
ugaacucaaucauugccuguu

SEQ ID NO: 423 - RNA, 21 nt, RNAi-antisense strand
caggcaaugauugaguucauu

SEQ ID NO: 424 - DNA, 21 bp, Homo sapiens
aactcaatcattgcctgtctc

SEQ ID NO: 425 - RNA, 21 nt, RNAi-sense strand
cucaaucauugccugucucuu

SEQ ID NO: 426 - RNA, 21 nt, RNAi-antisense strand
gagacaggcaaugauugaguu

SEQ ID NO: 427 - DNA, 21 bp, Homo sapiens
aatcattgcctgtctctgaga

SEQ ID NO: 428 - RNA, 21 nt, RNAi-sense strand
ucauugccugucucugagauu

SEQ ID NO: 429 - RNA, 21 nt, RNAi-antisense strand
ucucagagacaggcaaugauu

SEQ ID NO: 430 - DNA, 21 bp, Homo sapiens
aacatacttagttggaaactc

SEQ ID NO: 431 - RNA, 21 nt, RNAi-sense strand
cauacuuaguuggaaacucuu

SEQ ID NO: 432 - RNA, 21 nt, RNAi-antisense strand
gaguuuccaacuaaguauguu

SEQ ID NO: 433 - DNA, 21 bp, Homo sapiens
aaactccttgagtttagcaga

SEQ ID NO: 434 - RNA, 21 nt, RNAi-sense strand
acuccuugaguuuagcagauu

SEQ ID NO: 435 - RNA, 21 nt, RNAi-antisense strand
ucugcuaaacucaaggaguuu

SEQ ID NO: 436 - DNA, 21 bp, Homo sapiens
aactccttgagtttagcagat

SEQ ID NO: 437 - RNA, 21 nt, RNAi-sense strand
cuccuugaguuuagcagauuu

SEQ ID NO: 438 - RNA, 21 nt, RNAi-antisense strand
aucugcuaaacucaaggaguu

SEQ ID NO: 439 - DNA, 21 bp, Homo sapiens
aaaggaaatgctgcctggcaa

SEQ ID NO: 440 - RNA, 21 nt, RNAi-sense strand
aggaaaugcugccuggcaauu

SEQ ID NO: 441 - RNA, 21 nt, RNAi-antisense strand
uugccaggcagcauuuccuuu

SEQ ID NO: 442 - DNA, 21 bp, Homo sapiens
aaggaaatgctgcctggcaag

SEQ ID NO: 443 - RNA, 21 nt, RNAi-sense strand
ggaaaugcugccuggcaaguu

SEQ ID NO: 444 - RNA, 21 nt, RNAi-antisense strand
cuugccaggcagcauuuccuu

SEQ ID NO: 445 - DNA, 21 bp, Homo sapiens
aaatgctgcctggcaagaaca

SEQ ID NO: 446 - RNA, 21 nt, RNAi-sense strand
augcugccuggcaagaacauu

SEQ ID NO: 447 - RNA, 21 nt, RNAi-antisense strand
uguucuugccaggcagcauuu

SEQ ID NO: 448 - DNA, 21 bp, Homo sapiens
aatgctgcctggcaagaacag

SEQ ID NO: 449 - RNA, 21 nt, RNAi-sense strand
ugcugccuggcaagaacaguu

SEQ ID NO: 450 - RNA, 21 nt, RNAi-antisense strand
cuguucuugccaggcagcauu

SEQ ID NO: 451 - DNA, 21 bp, Homo sapiens
aagaacagttgaaacagaaga

SEQ ID NO: 452 - RNA, 21 nt, RNAi-sense strand
gaacaguugaaacagaagauu

SEQ ID NO: 453 - RNA, 21 nt, RNAi-antisense strand
ucuucuguuucaacuguucuu

SEQ ID NO: 454 - DNA, 21 bp, Homo sapiens
aacagttgaaacagaagaaag

SEQ ID NO: 455 - RNA, 21 nt, RNAi-sense strand
caguugaaacagaagaaaguu

SEQ ID NO: 456 - RNA, 21 nt, RNAi-antisense strand
cuuucuucuguuucaacuguu

SEQ ID NO: 457 - DNA, 21 bp, Homo sapiens
aaacagaagaaagctccagtt

SEQ ID NO: 458 - RNA, 21 nt, RNAi-sense strand
acagaagaaagcuccaguuuu

SEQ ID NO: 459 - RNA, 21 nt, RNAi-antisense strand
aacuggagcuuucuucuguuu

SEQ ID NO: 460 - DNA, 21 bp, Homo sapiens
aacagaagaaagctccagttc

SEQ ID NO: 461 - RNA, 21 nt, RNAi-sense strand
cagaagaaagcuccaguucuu

SEQ ID NO: 462 - RNA, 21 nt, RNAi-antisense strand
gaacuggagcuuucuucuguu

SEQ ID NO: 463 - DNA, 21 bp, Homo sapiens
aagaaagctccagttcatgta

SEQ ID NO: 464 - RNA, 21 nt, RNAi-sense strand
gaaagcuccaguucauguauu

SEQ ID NO: 465 - RNA, 21 nt, RNAi-antisense strand
uacaugaacuggagcuuucuu

SEQ ID NO: 466 - DNA, 21 bp, Homo sapiens
aaacgttggtttggctttctt

SEQ ID NO: 467 - RNA, 21 nt, RNAi-sense strand
acguugguuuggcuuucuuuu

SEQ ID NO: 468 - RNA, 21 nt, RNAi-antisense strand
aagaaagccaaaccaacguuu

SEQ ID NO: 469 - DNA, 21 bp, Homo sapiens
aacgttggtttggctttcttg

SEQ ID NO: 470 - RNA, 21 nt, RNAi-sense strand
cguugguuuggcuuucuuguu

SEQ ID NO: 471 - RNA, 21 nt, RNAi-antisense strand
caagaaagccaaaccaacguu

SEQ ID NO: 472 - DNA, 21 bp, Homo sapiens
aacaaccaaagctcgagtggc

SEQ ID NO: 473 - RNA, 21 nt, RNAi-sense strand
caaccaaagcucgaguggcuu

SEQ ID NO: 474 - RNA, 21 nt, RNAi-antisense strand
gccacucgagcuuugguuguu

SEQ ID NO: 475 - DNA, 21 bp, Homo sapiens
aaccaaagctcgagtggcacc

SEQ ID NO: 476 - RNA, 21 nt, RNAi-sense strand
ccaaagcucgaguggcaccuu

SEQ ID NO: 477 - RNA, 21 nt, RNAi-antisense strand
ggugccacucgagcuuugguu

SEQ ID NO: 478 - DNA, 21 bp, Homo sapiens
aaagctcgagtggcacctgag

SEQ ID NO: 479 - RNA, 21 nt, RNAi-sense strand
agcucgaguggcaccugaguu

SEQ ID NO: 480 - RNA, 21 nt, RNAi-antisense strand
cucaggugccacucgagcuuu

SEQ ID NO: 481 - DNA, 21 bp, Homo sapiens
aagctcgagtggcacctgaga

SEQ ID NO: 482 - RNA, 21 nt, RNAi-sense strand
gcucgaguggcaccugagauu

SEQ ID NO: 483 - RNA, 21 nt, RNAi-antisense strand
ucucaggugccacucgagcuu

SEQ ID NO: 484 - DNA, 21 bp, Homo sapiens
aaatttgttgagcttccaggt

SEQ ID NO: 485 - RNA, 21 nt, RNAi-sense strand
auuuguugagcuuccagguuu

SEQ ID NO: 486 - RNA, 21 nt, RNAi-antisense strand
accuggaagcucaacaaauuu

SEQ ID NO: 487 - DNA, 21 bp, Homo sapiens
aatttgttgagcttccaggtg

SEQ ID NO: 488 - RNA, 21 nt, RNAi-sense strand
uuuguugagcuuccagguguu

SEQ ID NO: 489 - RNA, 21 nt, RNAi-antisense strand
caccuggaagcucaacaaauu

SEQ ID NO: 490 - DNA, 21 bp, Homo sapiens
aaaggttaccgtcagatttcc

SEQ ID NO: 491 - RNA, 21 nt, RNAi-sense strand
agguuaccgucagauuuccuu

SEQ ID NO: 492 - RNA, 21 nt, RNAi-antisense strand
ggaaaucugacgguaaccuuu

SEQ ID NO: 493 - DNA, 21 bp, Homo sapiens
aaggttaccgtcagatttcct

SEQ ID NO: 494 - RNA, 21 nt, RNAi-sense strand
gguuaccgucagauuuccuuu

SEQ ID NO: 495 - RNA, 21 nt, RNAi-antisense strand
aggaaaucugacgguaaccuu

SEQ ID NO: 496 - DNA, 21 bp, Homo sapiens
aaagctgctcttctgaaccag

SEQ ID NO: 497 - RNA, 21 nt, RNAi-sense strand
agcugcucuucugaaccaguu

SEQ ID NO: 498 - RNA, 21 nt, RNAi-antisense strand
cugguucagaagagcagcuuu

SEQ ID NO: 499 - DNA, 21 bp, Homo sapiens
aagctgctcttctgaaccagc

SEQ ID NO: 500 - RNA, 21 nt, RNAi-sense strand
gcugcucuucugaaccagcuu

SEQ ID NO: 501 - RNA, 21 nt, RNAi-antisense strand
gcugguucagaagagcagcuu

SEQ ID NO: 502 - DNA, 21 bp, Homo sapiens
aaccagcactaccaggttaac

SEQ ID NO: 503 - RNA, 21 nt, RNAi-sense strand
ccagcacuaccagguuaacuu

SEQ ID NO: 504 - RNA, 21 nt, RNAi-antisense strand
guuaaccugguagugcugguu

SEQ ID NO: 505 - DNA, 21 bp, Homo sapiens
aactgatcatgagatttgatg

SEQ ID NO: 506 - RNA, 21 nt, RNAi-sense strand
cugaucaugagauuugauguu

SEQ ID NO: 507 - RNA, 21 nt, RNAi-antisense strand
caucaaaucucaugaucaguu

SEQ ID NO: 508 - DNA, 21 bp, Homo sapiens
aaggttatcttggaagatgtt

SEQ ID NO: 509 - RNA, 21 nt, RNAi-sense strand
gguuaucuuggaagauguuuu

SEQ ID NO: 510 - RNA, 21 nt, RNAi-antisense strand
aacaucuuccaagauaaccuu

SEQ ID NO: 511 - DNA, 21 bp, Homo sapiens
aagatgttgcaatgttgcata

SEQ ID NO: 512 - RNA, 21 nt, RNAi-sense strand
gauguugcaauguugcauauu

SEQ ID NO: 513 - RNA, 21 nt, RNAi-antisense strand
uaugcaacauugcaacaucuu

SEQ ID NO: 514 - DNA, 21 bp, Homo sapiens
aatgttgcatatcaaaccaga

SEQ ID NO: 515 - RNA, 21 nt, RNAi-sense strand
uguugcauaucaaaccagauu

SEQ ID NO: 516 - RNA, 21 nt, RNAi-antisense strand
ucugguuugauaugcaacauu

SEQ ID NO: 517 - DNA, 21 bp, Homo sapiens
aatgaagtatgcagagaagct

SEQ ID NO: 518 - RNA, 21 nt, RNAi-sense strand
ugaaguaugcagagaagcuuu

SEQ ID NO: 519 - RNA, 21 nt, RNAi-antisense strand
agcuucucugcauacuucauu

SEQ ID NO: 520 - DNA, 21 bp, Homo sapiens
aagtatgcagagaagctaatt

SEQ ID NO: 521 - RNA, 21 nt, RNAi-sense strand
guaugcagagaagcuaauuuu

SEQ ID NO: 522 - RNA, 21 nt, RNAi-antisense strand
aauuagcuucucugcauacuu

SEQ ID NO: 523 - DNA, 21 bp, Homo sapiens
aaggcttatgtggatgatact

SEQ ID NO: 524 - RNA, 21 nt, RNAi-sense strand
ggcuuauguggaugauacuuu

SEQ ID NO: 525 - RNA, 21 nt, RNAi-antisense strand
aguaucauccacauaagccuu

SEQ ID NO: 526 - DNA, 21 bp, Homo sapiens
aacagatgaaagcagaacgtg

SEQ ID NO: 527 - RNA, 21 nt, RNAi-sense strand
cagaugaaagcagaacguguu

SEQ ID NO: 528 - RNA, 21 nt, RNAi-antisense strand
cacguucugcuuucaucuguu

SEQ ID NO: 529 - DNA, 21 bp, Homo sapiens
aaagcagaacgtgagcagagg

SEQ ID NO: 530 - RNA, 21 nt, RNAi-sense strand
agcagaacgugagcagagguu

SEQ ID NO: 531 - RNA, 21 nt, RNAi-antisense strand
ccucugcucacguucugcuuu

SEQ ID NO: 532 - DNA, 21 bp, Homo sapiens
aagcagaacgtgagcagagga

SEQ ID NO: 533 - RNA, 21 nt, RNAi-sense strand
gcagaacgugagcagaggauu

SEQ ID NO: 534 - RNA, 21 nt, RNAi-antisense strand
uccucugcucacguucugcuu

SEQ ID NO: 535 - DNA, 21 bp, Homo sapiens
aacgtgagcagaggatagaat

SEQ ID NO: 536 - RNA, 21 nt, RNAi-sense strand
cgugagcagaggauagaauuu

SEQ ID NO: 537 - RNA, 21 nt, RNAi-antisense strand
auucuauccucugcucacguu

SEQ ID NO: 538 - DNA, 21 bp, Homo sapiens
aacaatggatgcatgagagat

SEQ ID NO: 539 - RNA, 21 nt, RNAi-sense strand
caauggaugcaugagagauuu

SEQ ID NO: 540 - RNA, 21 nt, RNAi-antisense strand
aucucucaugcauccauuguu

SEQ ID NO: 541 - DNA, 21 bp, Homo sapiens
aatggatgcatgagagatcca

SEQ ID NO: 542 - RNA, 21 nt, RNAi-sense strand
uggaugcaugagagauccauu

SEQ ID NO: 543 - RNA, 21 nt, RNAi-antisense strand
uggaucucucaugcauccauu

SEQ ID NO: 544 - DNA, 21 bp, Homo sapiens
aaattcaaccacatccaagaa

SEQ ID NO: 545 - RNA, 21 nt, RNAi-sense strand
auucaaccacauccaagaauu

SEQ ID NO: 546 - RNA, 21 nt, RNAi-antisense strand
uucuuggaugugguugaauuu

SEQ ID NO: 547 - DNA, 21 bp, Homo sapiens
aattcaaccacatccaagaac

SEQ ID NO: 548 - RNA, 21 nt, RNAi-sense strand
uucaaccacauccaagaacuu

SEQ ID NO: 549 - RNA, 21 nt, RNAi-antisense strand
guucuuggaugugguugaauu

SEQ ID NO: 550 - DNA, 21 bp, Homo sapiens
aaccacatccaagaactggaa

SEQ ID NO: 551 - RNA, 21 nt, RNAi-sense strand
ccacauccaagaacuggaauu

SEQ ID NO: 552 - RNA, 21 nt, RNAi-antisense strand
uuccaguucuuggaugugguu

SEQ ID NO: 553 - DNA, 21 bp, Homo sapiens
aacaacagaataccatgacag

SEQ ID NO: 554 - RNA, 21 nt, RNAi-sense strand
caacagaauaccaugacaguu

SEQ ID NO: 555 - RNA, 21 nt, RNAi-antisense strand
cugucaugguauucuguuguu

SEQ ID NO: 556 - DNA, 21 bp, Homo sapiens
aacagaataccatgacagaga

SEQ ID NO: 557 - RNA, 21 nt, RNAi-sense strand
cagaauaccaugacagagauu

SEQ ID NO: 558 - RNA, 21 nt, RNAi-antisense strand
ucucugucaugguauucuguu

SEQ ID NO: 559 - DNA, 21 bp, Homo sapiens
aataccatgacagagatgagc

SEQ ID NO: 560 - RNA, 21 nt, RNAi-sense strand
uaccaugacagagaugagcuu

SEQ ID NO: 561 - RNA, 21 nt, RNAi-antisense strand
gcucaucucugucaugguauu

SEQ ID NO: 562 - DNA, 21 bp, Homo sapiens
aatatagtcggctaaatctca

SEQ ID NO: 563 - RNA, 21 nt, RNAi-sense strand
uauagucggcuaaaucucauu

SEQ ID NO: 564 - RNA, 21 nt, RNAi-antisense strand
ugagauuuagccgacuauauu

SEQ ID NO: 565 - DNA, 21 bp, Homo sapiens
aaatctcaacaacacagtgct

SEQ ID NO: 566 - RNA, 21 nt, RNAi-sense strand
aucucaacaacacagugcuuu

SEQ ID NO: 567 - RNA, 21 nt, RNAi-antisense strand
agcacuguguuguugagauuu

SEQ ID NO: 568 - DNA, 21 bp, Homo sapiens
aatctcaacaacacagtgcta

SEQ ID NO: 569 - RNA, 21 nt, RNAi-sense strand
ucucaacaacacagugcuauu

SEQ ID NO: 570 - RNA, 21 nt, RNAi-antisense strand
uagcacuguguuguugagauu

SEQ ID NO: 571 - DNA, 21 bp, Homo sapiens
aacaacacagtgctatccaaa

SEQ ID NO: 572 - RNA, 21 nt, RNAi-sense strand
caacacagugcuauccaaauu

SEQ ID NO: 573 - RNA, 21 nt, RNAi-antisense strand
uuuggauagcacuguguuguu

SEQ ID NO: 574 - DNA, 21 bp, Homo sapiens
aaactcacatggtttgtcaat

SEQ ID NO: 575 - RNA, 21 nt, RNAi-sense strand
acucacaugguuugucaauuu

SEQ ID NO: 576 - RNA, 21 nt, RNAi-antisense strand
auugacaaaccaugugaguuu

SEQ ID NO: 577 - DNA, 21 bp, Homo sapiens
aactcacatggtttgtcaatg

SEQ ID NO: 578 - RNA, 21 nt, RNAi-sense strand
cucacaugguuugucaauguu

SEQ ID NO: 579 - RNA, 21 nt, RNAi-antisense strand
cauugacaaaccaugugaguu

SEQ ID NO: 580 - DNA, 21 bp, Homo sapiens
aatgaaggactagtagatgga

SEQ ID NO: 581 - RNA, 21 nt, RNAi-sense strand
ugaaggacuaguagauggauu

SEQ ID NO: 582 - RNA, 21 nt, RNAi-antisense strand
uccaucuacuaguccuucauu

SEQ ID NO: 583 - DNA, 21 bp, Homo sapiens
aagatttcctacggttcgtgg

SEQ ID NO: 584 - RNA, 21 nt, RNAi-sense strand
gauuuccuacgguucgugguu

SEQ ID NO: 585 - RNA, 21 nt, RNAi-antisense strand
ccacgaaccguaggaaaucuu

SEQ ID NO: 586 - DNA, 21 bp, Homo sapiens
aaggactgaaacagtttattg

SEQ ID NO: 587 - RNA, 21 nt, RNAi-sense strand
ggacugaaacaguuuauuguu

SEQ ID NO: 588 - RNA, 21 nt, RNAi-antisense strand
caauaaacuguuucaguccuu

SEQ ID NO: 589 - DNA, 21 bp, Homo sapiens
aaacagtttattgctgctcag

SEQ ID NO: 590 - RNA, 21 nt, RNAi-sense strand
acaguuuauugcugcucaguu

SEQ ID NO: 591 - RNA, 21 nt, RNAi-antisense strand
cugagcagcaauaaacuguuu

SEQ ID NO: 592 - DNA, 21 bp, Homo sapiens
aacagtttattgctgctcagg

SEQ ID NO: 593 - RNA, 21 nt, RNAi-sense strand
caguuuauugcugcucagguu

SEQ ID NO: 594 - RNA, 21 nt, RNAi-antisense strand
ccugagcagcaauaaacuguu

SEQ ID NO: 595 - DNA, 21 bp, Homo sapiens
aatgtacctgaagctcaggag

SEQ ID NO: 596 - RNA, 21 nt, RNAi-sense strand
uguaccugaagcucaggaguu

SEQ ID NO: 597 - RNA, 21 nt, RNAi-antisense strand
cuccugagcuucagguacauu

SEQ ID NO: 598 - DNA, 21 bp, Homo sapiens
aagctcaggaggagatgaaag

SEQ ID NO: 599 - RNA, 21 nt, RNAi-sense strand
gcucaggaggagaugaaaguu

SEQ ID NO: 600 - RNA, 21 nt, RNAi-antisense strand
cuuucaucuccuccugagcuu

SEQ ID NO: 601 - DNA, 21 bp, Homo sapiens
aaagaatcctgaggttggctt

SEQ ID NO: 602 - RNA, 21 nt, RNAi-sense strand
agaauccugagguuggcuuuu

SEQ ID NO: 603 - RNA, 21 nt, RNAi-antisense strand
aagccaaccucaggauucuuu

SEQ ID NO: 604 - DNA, 21 bp, Homo sapiens
aagaatcctgaggttggcttg

SEQ ID NO: 605 - RNA, 21 nt, RNAi-sense strand
gaauccugagguuggcuuguu

SEQ ID NO: 606 - RNA, 21 nt, RNAi-antisense strand
caagccaaccucaggauucuu

SEQ ID NO: 607 - DNA, 21 bp, Homo sapiens
aatcctgaggttggcttgaag

SEQ ID NO: 608 - RNA, 21 nt, RNAi-sense strand
uccugagguuggcuugaaguu

SEQ ID NO: 609 - RNA, 21 nt, RNAi-antisense strand
cuucaagccaaccucaggauu

SEQ ID NO: 610 - DNA, 21 bp, Homo sapiens
aaggtgctgatgcagagactt

SEQ ID NO: 611 - RNA, 21 nt, RNAi-sense strand
ggugcugaugcagagacuuuu

SEQ ID NO: 612 - RNA, 21 nt, RNAi-antisense strand
aagucucugcaucagcaccuu

SEQ ID NO: 613 - DNA, 21 bp, Homo sapiens
aaaccactaaggtcacttggc

SEQ ID NO: 614 - RNA, 21 nt, RNAi-sense strand
accacuaaggucacuuggcuu

SEQ ID NO: 615 - RNA, 21 nt, RNAi-antisense strand
gccaagugaccuuagugguuu

SEQ ID NO: 616 - DNA, 21 bp, Homo sapiens
aaccactaaggtcacttggct

SEQ ID NO: 617 - RNA, 21 nt, RNAi-sense strand
ccacuaaggucacuuggcuuu

SEQ ID NO: 618 - RNA, 21 nt, RNAi-antisense strand
agccaagugaccuuagugguu

SEQ ID NO: 619 - DNA, 21 bp, Homo sapiens
aaggtcacttggcttgcagag

SEQ ID NO: 620 - RNA, 21 nt, RNAi-sense strand
ggucacuuggcuugcagaguu

SEQ ID NO: 621 - RNA, 21 nt, RNAi-antisense strand
cucugcaagccaagugaccuu

SEQ ID NO: 622 - DNA, 21 bp, Homo sapiens
aatctgtgtcacttatgagca

SEQ ID NO: 623 - RNA, 21 nt, RNAi-sense strand
ucugugucacuuaugagcauu

SEQ ID NO: 624 - RNA, 21 nt, RNAi-antisense strand
ugcucauaagugacacagauu

SEQ ID NO: 625 - DNA, 21 bp, Homo sapiens
aaagacgaggactttaagcag

SEQ ID NO: 626 - RNA, 21 nt, RNAi-sense strand
agacgaggacuuuaagcaguu

SEQ ID NO: 627 - RNA, 21 nt, RNAi-antisense strand
cugcuuaaaguccucgucuuu

SEQ ID NO: 628 - DNA, 21 bp, Homo sapiens
aagacgaggactttaagcagt

SEQ ID NO: 629 - RNA, 21 nt, RNAi-sense strand
gacgaggacuuuaagcaguuu

SEQ ID NO: 630 - RNA, 21 nt, RNAi-antisense strand
acugcuuaaaguccucgucuu

SEQ ID NO: 631 - DNA, 21 bp, Homo sapiens
aagcagtatgtcaacaagaac

SEQ ID NO: 632 - RNA, 21 nt, RNAi-sense strand
gcaguaugucaacaagaacuu

SEQ ID NO: 633 - RNA, 21 nt, RNAi-antisense strand
guucuuguugacauacugcuu

SEQ ID NO: 634 - DNA, 21 bp, Homo sapiens
aacaagaacagtaagcatgaa

SEQ ID NO: 635 - RNA, 21 nt, RNAi-sense strand
caagaacaguaagcaugaauu

SEQ ID NO: 636 - RNA, 21 nt, RNAi-antisense strand
uucaugcuuacuguucuuguu

SEQ ID NO: 637 - DNA, 21 bp, Homo sapiens
aagaacagtaagcatgaagag

SEQ ID NO: 638 - RNA, 21 nt, RNAi-sense strand
gaacaguaagcaugaagaguu

SEQ ID NO: 639 - RNA, 21 nt, RNAi-antisense strand
cucuucaugcuuacuguucuu

SEQ ID NO: 640 - DNA, 21 bp, Homo sapiens
aacagtaagcatgaagagcta

SEQ ID NO: 641 - RNA, 21 nt, RNAi-sense strand
caguaagcaugaagagcuauu

SEQ ID NO: 642 - RNA, 21 nt, RNAi-antisense strand
uagcucuucaugcuuacuguu

SEQ ID NO: 643 - DNA, 21 bp, Homo sapiens
aagcatgaagagctaatgcta

SEQ ID NO: 644 - RNA, 21 nt, RNAi-sense strand
gcaugaagagcuaaugcuauu

SEQ ID NO: 645 - RNA, 21 nt, RNAi-antisense strand
uagcauuagcucuucaugcuu

SEQ ID NO: 646 - DNA, 21 bp, Homo sapiens
aaggagatattatacaactcc

SEQ ID NO: 647 - RNA, 21 nt, RNAi-sense strand
ggagauauuauacaacuccuu

SEQ ID NO: 648 - RNA, 21 nt, RNAi-antisense strand
ggaguuguauaauaucuccuu

SEQ ID NO: 649 - DNA, 21 bp, Homo sapiens
aactccagagaagaggattct

SEQ ID NO: 650 - RNA, 21 nt, RNAi-sense strand
cuccagagaagaggauucuuu

SEQ ID NO: 651 - RNA, 21 nt, RNAi-antisense strand
agaauccucuucucuggaguu

SEQ ID NO: 652 - DNA, 21 bp, Homo sapiens
aagaggattcttcatatgtga

SEQ ID NO: 653 - RNA, 21 nt, RNAi-sense strand
gaggauucuucauaugugauu

SEQ ID NO: 654 - RNA, 21 nt, RNAi-antisense strand
ucacauaugaagaauccucuu

SEQ ID NO: 655 - DNA, 21 bp, Homo sapiens
aaccttatgaacctgttagcc

SEQ ID NO: 656 - RNA, 21 nt, RNAi-sense strand
ccuuaugaaccuguuagccuu

SEQ ID NO: 657 - RNA, 21 nt, RNAi-antisense strand
ggcuaacagguucauaagguu

SEQ ID NO: 658 - DNA, 21 bp, Homo sapiens
aaaggaaatgccaacatcagg

SEQ ID NO: 659 - RNA, 21 nt, RNAi-sense strand
aggaaaugccaacaucagguu

SEQ ID NO: 660 - RNA, 21 nt, RNAi-antisense strand
ccugauguuggcauuuccuuu

SEQ ID NO: 661 - DNA, 21 bp, Homo sapiens
aaagaccaaagtagaagccac

SEQ ID NO: 662 - RNA, 21 nt, RNAi-sense strand
agaccaaaguagaagccacuu

SEQ ID NO: 663 - RNA, 21 nt, RNAi-antisense strand
guggcuucuacuuuggucuuu

SEQ ID NO: 664 - DNA, 21 bp, Homo sapiens
aagaccaaagtagaagccaca

SEQ ID NO: 665 - RNA, 21 nt, RNAi-sense strand
gaccaaaguagaagccacauu

SEQ ID NO: 666 - RNA, 21 nt, RNAi-antisense strand
uguggcuucuacuuuggucuu

SEQ ID NO: 667 - DNA, 21 bp, Homo sapiens
aaatgagacctctgctccttt

SEQ ID NO: 668 - RNA, 21 nt, RNAi-sense strand
augagaccucugcuccuuuuu

SEQ ID NO: 669 - RNA, 21 nt, RNAi-antisense strand
aaaggagcagaggucucauuu

SEQ ID NO: 670 - DNA, 21 bp, Homo sapiens
aaggaaagaccaacaccttct

SEQ ID NO: 671 - RNA, 21 nt, RNAi-sense strand
ggaaagaccaacaccuucuuu

SEQ ID NO: 672 - RNA, 21 nt, RNAi-antisense strand
agaagguguuggucuuuccuu

SEQ ID NO: 673 - DNA, 21 bp, Homo sapiens
aaagaccaacaccttctctga

SEQ ID NO: 674 - RNA, 21 nt, RNAi-sense strand
agaccaacaccuucucugauu

SEQ ID NO: 675 - RNA, 21 nt, RNAi-antisense strand
ucagagaagguguuggucuuu

SEQ ID NO: 676 - DNA, 21 bp, Homo sapiens
aagaccaacaccttctctgaa

SEQ ID NO: 677 - RNA, 21 nt, RNAi-sense strand
gaccaacaccuucucugaauu

SEQ ID NO: 678 - RNA, 21 nt, RNAi-antisense strand
uucagagaagguguuggucuu

SEQ ID NO: 679 - DNA, 21 bp, Homo sapiens
aattgtactacatctgaggat

SEQ ID NO: 680 - RNA, 21 nt, RNAi-sense strand
uuguacuacaucugaggauuu

SEQ ID NO: 681 - RNA, 21 nt, RNAi-antisense strand
auccucagauguaguacaauu

SEQ ID NO: 682 - DNA, 21 bp, Homo sapiens
aatagagtggctgttcaagga

SEQ ID NO: 683 - RNA, 21 nt, RNAi-sense strand
uagaguggcuguucaaggauu

SEQ ID NO: 684 - RNA, 21 nt, RNAi-antisense strand
uccuugaacagccacucuauu

SEQ ID NO: 685 - DNA, 21 bp, Homo sapiens
aaggagatgtggttcgtgaat

SEQ ID NO: 686 - RNA, 21 nt, RNAi-sense strand
ggagaugugguucgugaauuu

SEQ ID NO: 687 - RNA, 21 nt, RNAi-antisense strand
auucacgaaccacaucuccuu

SEQ ID NO: 688 - DNA, 21 bp, Homo sapiens
aaagccaagaaagcaccaaag

SEQ ID NO: 689 - RNA, 21 nt, RNAi-sense strand
agccaagaaagcaccaaaguu

SEQ ID NO: 690 - RNA, 21 nt, RNAi-antisense strand
cuuuggugcuuucuuggcuuu

SEQ ID NO: 691 - DNA, 21 bp, Homo sapiens
aagccaagaaagcaccaaagg

SEQ ID NO: 692 - RNA, 21 nt, RNAi-sense strand
gccaagaaagcaccaaagguu

SEQ ID NO: 693 - RNA, 21 nt, RNAi-antisense strand
ccuuuggugcuuucuuggcuu

SEQ ID NO: 694 - DNA, 21 bp, Homo sapiens
aagaaagcaccaaaggaagat

SEQ ID NO: 695 - RNA, 21 nt, RNAi-sense strand
gaaagcaccaaaggaagauuu

SEQ ID NO: 696 - RNA, 21 nt, RNAi-antisense strand
aucuuccuuuggugcuuucuu

SEQ ID NO: 697 - DNA, 21 bp, Homo sapiens
aaagcaccaaaggaagatgta

SEQ ID NO: 698 - RNA, 21 nt, RNAi-sense strand
agcaccaaaggaagauguauu

SEQ ID NO: 699 - RNA, 21 nt, RNAi-antisense strand
uacaucuuccuuuggugcuuu

SEQ ID NO: 700 - DNA, 21 bp, Homo sapiens
aagcaccaaaggaagatgtag

SEQ ID NO: 701 - RNA, 21 nt, RNAi-sense strand
gcaccaaaggaagauguaguu

SEQ ID NO: 702 - RNA, 21 nt, RNAi-antisense strand
cuacaucuuccuuuggugcuu

SEQ ID NO: 703 - DNA, 21 bp, Homo sapiens
aaaggaagatgtagatgcagc

SEQ ID NO: 704 - RNA, 21 nt, RNAi-sense strand
aggaagauguagaugcagcuu

SEQ ID NO: 705 - RNA, 21 nt, RNAi-antisense strand
gcugcaucuacaucuuccuuu

SEQ ID NO: 706 - DNA, 21 bp, Homo sapiens
aaggaagatgtagatgcagct

SEQ ID NO: 707 - RNA, 21 nt, RNAi-sense strand
ggaagauguagaugcagcuuu

SEQ ID NO: 708 - RNA, 21 nt, RNAi-antisense strand
agcugcaucuacaucuuccuu

SEQ ID NO: 709 - DNA, 21 bp, Homo sapiens
aagatgtagatgcagctgtaa

SEQ ID NO: 710 - RNA, 21 nt, RNAi-sense strand
gauguagaugcagcuguaauu

SEQ ID NO: 711 - RNA, 21 nt, RNAi-antisense strand
uuacagcugcaucuacaucuu

SEQ ID NO: 712 - DNA, 21 bp, Homo sapiens
aaactggccaggaatataaac

SEQ ID NO: 713 - RNA, 21 nt, RNAi-sense strand
acuggccaggaauauaaacuu

SEQ ID NO: 714 - RNA, 21 nt, RNAi-antisense strand
guuuauauuccuggccaguuu

SEQ ID NO: 715 - DNA, 21 bp, Homo sapiens
aactggccaggaatataaacc

SEQ ID NO: 716 - RNA, 21 nt, RNAi-sense strand
cuggccaggaauauaaaccuu

SEQ ID NO: 717 - RNA, 21 nt, RNAi-antisense strand
gguuuauauuccuggccaguu

SEQ ID NO: 718 - DNA, 21 bp, Homo sapiens
aattcctcagcaagtattctg

SEQ ID NO: 719 - RNA, 21 nt, RNAi-sense strand
uuccucagcaaguauucuguu

SEQ ID NO: 720 - RNA, 21 nt, RNAi-antisense strand
cagaauacuugcugaggaauu

SEQ ID NO: 721 - DNA, 21 bp, Homo sapiens
aatctctgtatgatgaagttg

SEQ ID NO: 722 - RNA, 21 nt, RNAi-sense strand
ucucuguaugaugaaguuguu

SEQ ID NO: 723 - RNA, 21 nt, RNAi-antisense strand
caacuucaucauacagagauu

SEQ ID NO: 724 - DNA, 21 bp, Homo sapiens
aaatgaagctgtagaatgctt

SEQ ID NO: 725 - RNA, 21 nt, RNAi-sense strand
augaagcuguagaaugcuuuu

SEQ ID NO: 726 - RNA, 21 nt, RNAi-antisense strand
aagcauucuacagcuucauuu

SEQ ID NO: 727 - DNA, 21 bp, Homo sapiens
aatgaagctgtagaatgctta

SEQ ID NO: 728 - RNA, 21 nt, RNAi-sense strand
ugaagcuguagaaugcuuauu

SEQ ID NO: 729 - RNA, 21 nt, RNAi-antisense strand
uaagcauucuacagcuucauu

SEQ ID NO: 730 - DNA, 21 bp, Homo sapiens
aagctgtagaatgcttactgt

SEQ ID NO: 731 - RNA, 21 nt, RNAi-sense strand
gcuguagaaugcuuacuguuu

SEQ ID NO: 732 - RNA, 21 nt, RNAi-antisense strand
acaguaagcauucuacagcuu

SEQ ID NO: 733 - DNA, 21 bp, Homo sapiens
aaggagtacatacctggtcag

SEQ ID NO: 734 - RNA, 21 nt, RNAi-sense strand
ggaguacauaccuggucaguu

SEQ ID NO: 735 - RNA, 21 nt, RNAi-antisense strand
cugaccagguauguacuccuu

SEQ ID NO: 736 - DNA, 21 bp, Homo sapiens
aaccagaaattctgaacctgc

SEQ ID NO: 737 - RNA, 21 nt, RNAi-sense strand
ccagaaauucugaaccugcuu

SEQ ID NO: 738 - RNA, 21 nt, RNAi-antisense strand
gcagguucagaauuucugguu

SEQ ID NO: 739 - DNA, 21 bp, Homo sapiens
aaattctgaacctgctggttt

SEQ ID NO: 740 - RNA, 21 nt, RNAi-sense strand
auucugaaccugcugguuuuu

SEQ ID NO: 741 - RNA, 21 nt, RNAi-antisense strand
aaaccagcagguucagaauuu

SEQ ID NO: 742 - DNA, 21 bp, Homo sapiens
aattctgaacctgctggttta

SEQ ID NO: 743 - RNA, 21 nt, RNAi-sense strand
uucugaaccugcugguuuauu

SEQ ID NO: 744 - RNA, 21 nt, RNAi-antisense strand
uaaaccagcagguucagaauu

SEQ ID NO: 745 - DNA, 21 bp, Homo sapiens
aacctgctggtttagaaacac

SEQ ID NO: 746 - RNA, 21 nt, RNAi-sense strand
ccugcugguuuagaaacacuu

SEQ ID NO: 747 - RNA, 21 nt, RNAi-antisense strand
guguuucuaaaccagcagguu

SEQ ID NO: 748 - DNA, 21 bp, Homo sapiens
aaacaccagaagcgaaagtac

SEQ ID NO: 749 - RNA, 21 nt, RNAi-sense strand
acaccagaagcgaaaguacuu

SEQ ID NO: 750 - RNA, 21 nt, RNAi-antisense strand
guacuuucgcuucugguguuu

SEQ ID NO: 751 - DNA, 21 bp, Homo sapiens
aacaccagaagcgaaagtact

SEQ ID NO: 752 - RNA, 21 nt, RNAi-sense strand
caccagaagcgaaaguacuuu

SEQ ID NO: 753 - RNA, 21 nt, RNAi-antisense strand
aguacuuucgcuucugguguu

SEQ ID NO: 754 - DNA, 21 bp, Homo sapiens
aaggatcaagtagatatagct

SEQ ID NO: 755 - RNA, 21 nt, RNAi-sense strand
ggaucaaguagauauagcuuu

SEQ ID NO: 756 - RNA, 21 nt, RNAi-antisense strand
agcuauaucuacuugauccuu

SEQ ID NO: 757 - DNA, 21 bp, Homo sapiens
aagtagatatagctgttcaag

SEQ ID NO: 758 - RNA, 21 nt, RNAi-sense strand
guagauauagcuguucaaguu

SEQ ID NO: 759 - RNA, 21 nt, RNAi-antisense strand
cuugaacagcuauaucuacuu

SEQ ID NO: 760 - DNA, 21 bp, Homo sapiens
aagaactccttcagctaaagg

SEQ ID NO: 761 - RNA, 21 nt, RNAi-sense strand
gaacuccuucagcuaaagguu

SEQ ID NO: 762 - RNA, 21 nt, RNAi-antisense strand
ccuuuagcugaaggaguucuu

SEQ ID NO: 763 - DNA, 21 bp, Homo sapiens
aactccttcagctaaaggcac

SEQ ID NO: 764 - RNA, 21 nt, RNAi-sense strand
cuccuucagcuaaaggcacuu

SEQ ID NO: 765 - RNA, 21 nt, RNAi-antisense strand
gugccuuuagcugaaggaguu

SEQ ID NO: 766 - DNA, 21 bp, Homo sapiens
aaaggcacagtacaagtcttt

SEQ ID NO: 767 - RNA, 21 nt, RNAi-sense strand
aggcacaguacaagucuuuuu

SEQ ID NO: 768 - RNA, 21 nt, RNAi-antisense strand
aaagacuuguacugugccuuu

SEQ ID NO: 769 - DNA, 21 bp, Homo sapiens
aaggcacagtacaagtctttg

SEQ ID NO: 770 - RNA, 21 nt, RNAi-sense strand
ggcacaguacaagucuuuguu

SEQ ID NO: 771 - RNA, 21 nt, RNAi-antisense strand
caaagacuuguacugugccuu

SEQ ID NO: 772 - DNA, 21 bp, Homo sapiens
aagtctttgataggagtagag

SEQ ID NO: 773 - RNA, 21 nt, RNAi-sense strand
gucuuugauaggaguagaguu

SEQ ID NO: 774 - RNA, 21 nt, RNAi-antisense strand
cucuacuccuaucaaagacuu

SEQ ID NO: 775 - DNA, 21 bp, Homo sapiens
aagcctgtgtcggccactgga

SEQ ID NO: 776 - RNA, 21 nt, RNAi-sense strand
gccugugucggccacuggauu

SEQ ID NO: 777 - RNA, 21 nt, RNAi-antisense strand
uccaguggccgacacaggcuu

SEQ ID NO: 778 - DNA, 21 bp, Homo sapiens
aaagcagaataagcctcagaa

SEQ ID NO: 779 - RNA, 21 nt, RNAi-sense strand
agcagaauaagccucagaauu

SEQ ID NO: 780 - RNA, 21 nt, RNAi-antisense strand
uucugaggcuuauucugcuuu

SEQ ID NO: 781 - DNA, 21 bp, Homo sapiens
aagcagaataagcctcagaaa

SEQ ID NO: 782 - RNA, 21 nt, RNAi-sense strand
gcagaauaagccucagaaauu

SEQ ID NO: 783 - RNA, 21 nt, RNAi-antisense strand
uuucugaggcuuauucugcuu

SEQ ID NO: 784 - DNA, 21 bp, Homo sapiens
aaatgatggccaaaggaaaga

SEQ ID NO: 785 - RNA, 21 nt, RNAi-sense strand
augauggccaaaggaaagauu

SEQ ID NO: 786 - RNA, 21 nt, RNAi-antisense strand
ucuuuccuuuggccaucauuu

SEQ ID NO: 787 - DNA, 21 bp, Homo sapiens
aatgatggccaaaggaaagac

SEQ ID NO: 788 - RNA, 21 nt, RNAi-sense strand
ugauggccaaaggaaagacuu

SEQ ID NO: 789 - RNA, 21 nt, RNAi-antisense strand
gucuuuccuuuggccaucauu

SEQ ID NO: 790 - DNA, 21 bp, Homo sapiens
aaatcttgctgattggtattc

SEQ ID NO: 791 - RNA, 21 nt, RNAi-sense strand
aucuugcugauugguauucuu

SEQ ID NO: 792 - RNA, 21 nt, RNAi-antisense strand
gaauaccaaucagcaagauuu

SEQ ID NO: 793 - DNA, 21 bp, Homo sapiens
aatcttgctgattggtattct

SEQ ID NO: 794 - RNA, 21 nt, RNAi-sense strand
ucuugcugauugguauucuuu

SEQ ID NO: 795 - RNA, 21 nt, RNAi-antisense strand
agaauaccaaucagcaagauu

SEQ ID NO: 796 - DNA, 21 bp, Homo sapiens
aataccatgacataagtggct

SEQ ID NO: 797 - RNA, 21 nt, RNAi-sense strand
uaccaugacauaaguggcuuu

SEQ ID NO: 798 - RNA, 21 nt, RNAi-antisense strand
agccacuuaugucaugguauu

SEQ ID NO: 799 - DNA, 21 bp, Homo sapiens
aagtggctgttatattcttcg

SEQ ID NO: 800 - RNA, 21 nt, RNAi-sense strand
guggcuguuauauucuucguu

SEQ ID NO: 801 - RNA, 21 nt, RNAi-antisense strand
cgaagaauauaacagccacuu

SEQ ID NO: 802 - DNA, 21 bp, Homo sapiens
aaagtgcattagagaaagaga

SEQ ID NO: 803 - RNA, 21 nt, RNAi-sense strand
agugcauuagagaaagagauu

SEQ ID NO: 804 - RNA, 21 nt, RNAi-antisense strand
ucucuuucucuaaugcacuuu

SEQ ID NO: 805 - DNA, 21 bp, Homo sapiens
aagtgcattagagaaagagaa

SEQ ID NO: 806 - RNA, 21 nt, RNAi-sense strand
gugcauuagagaaagagaauu

SEQ ID NO: 807 - RNA, 21 nt, RNAi-antisense strand
uucucuuucucuaaugcacuu

SEQ ID NO: 808 - DNA, 21 bp, Homo sapiens
aaagagaagactcatgttgct

SEQ ID NO: 809 - RNA, 21 nt, RNAi-sense strand
agagaagacucauguugcuuu

SEQ ID NO: 810 - RNA, 21 nt, RNAi-antisense strand
agcaacaugagucuucucuuu

SEQ ID NO: 811 - DNA, 21 bp, Homo sapiens
aagagaagactcatgttgctg

SEQ ID NO: 812 - RNA, 21 nt, RNAi-sense strand
gagaagacucauguugcuguu

SEQ ID NO: 813 - RNA, 21 nt, RNAi-antisense strand
cagcaacaugagucuucucuu

SEQ ID NO: 814 - DNA, 21 bp, Homo sapiens
aagactcatgttgctgacttt

SEQ ID NO: 815 - RNA, 21 nt, RNAi-sense strand
gacucauguugcugacuuuuu

SEQ ID NO: 816 - RNA, 21 nt, RNAi-antisense strand
aaagucagcaacaugagucuu

SEQ ID NO: 817 - DNA, 21 bp, Homo sapiens
aaaccgagctggcagaaccaa

SEQ ID NO: 818 - RNA, 21 nt, RNAi-sense strand
accgagcuggcagaaccaauu

SEQ ID NO: 819 - RNA, 21 nt, RNAi-antisense strand
uugguucugccagcucgguuu

SEQ ID NO: 820 - DNA, 21 bp, Homo sapiens
aaccgagctggcagaaccaat

SEQ ID NO: 821 - RNA, 21 nt, RNAi-sense strand
ccgagcuggcagaaccaauuu

SEQ ID NO: 822 - RNA, 21 nt, RNAi-antisense strand
auugguucugccagcucgguu

SEQ ID NO: 823 - DNA, 21 bp, Homo sapiens
aaccaattgccattcgtccta

SEQ ID NO: 824 - RNA, 21 nt, RNAi-sense strand
ccaauugccauucguccuauu

SEQ ID NO: 825 - RNA, 21 nt, RNAi-antisense strand
uaggacgaauggcaauugguu

SEQ ID NO: 826 - DNA, 21 bp, Homo sapiens
aattgccattcgtcctactag

SEQ ID NO: 827 - RNA, 21 nt, RNAi-sense strand
uugccauucguccuacuaguu

SEQ ID NO: 828 - RNA, 21 nt, RNAi-antisense strand
cuaguaggacgaauggcaauu

SEQ ID NO: 829 - DNA, 21 bp, Homo sapiens
aaacagtaatgtatcctgcat

SEQ ID NO: 830 - RNA, 21 nt, RNAi-sense strand
acaguaauguauccugcauuu

SEQ ID NO: 831 - RNA, 21 nt, RNAi-antisense strand
augcaggauacauuacuguuu

SEQ ID NO: 832 - DNA, 21 bp, Homo sapiens
aacagtaatgtatcctgcata

SEQ ID NO: 833 - RNA, 21 nt, RNAi-sense strand
caguaauguauccugcauauu

SEQ ID NO: 834 - RNA, 21 nt, RNAi-antisense strand
uaugcaggauacauuacuguu

SEQ ID NO: 835 - DNA, 21 bp, Homo sapiens
aatgtatcctgcatatgcaaa

SEQ ID NO: 836 - RNA, 21 nt, RNAi-sense strand
uguauccugcauaugcaaauu

SEQ ID NO: 837 - RNA, 21 nt, RNAi-antisense strand
uuugcauaugcaggauacauu

SEQ ID NO: 838 - DNA, 21 bp, Homo sapiens
aagctcaatcagtggtgcaat

SEQ ID NO: 839 - RNA, 21 nt, RNAi-sense strand
gcucaaucaguggugcaauuu

SEQ ID NO: 840 - RNA, 21 nt, RNAi-antisense strand
auugcaccacugauugagcuu

SEQ ID NO: 841 - DNA, 21 bp, Homo sapiens
aatcagtggtgcaatgtggtg

SEQ ID NO: 842 - RNA, 21 nt, RNAi-sense strand
ucaguggugcaaugugguguu

SEQ ID NO: 843 - RNA, 21 nt, RNAi-antisense strand
caccacauugcaccacugauu

SEQ ID NO: 844 - DNA, 21 bp, Homo sapiens
aattcaagcatcctcagcctt

SEQ ID NO: 845 - RNA, 21 nt, RNAi-sense strand
uucaagcauccucagccuuuu

SEQ ID NO: 846 - RNA, 21 nt, RNAi-antisense strand
aaggcugaggaugcuugaauu

SEQ ID NO: 847 - DNA, 21 bp, Homo sapiens
aagcatcctcagcctttccta

SEQ ID NO: 848 - RNA, 21 nt, RNAi-sense strand
gcauccucagccuuuccuauu

SEQ ID NO: 849 - RNA, 21 nt, RNAi-antisense strand
uaggaaaggcugaggaugcuu

SEQ ID NO: 850 - DNA, 21 bp, Homo sapiens
aagaggcagcggaagaggtct

SEQ ID NO: 851 - RNA, 21 nt, RNAi-sense strand
gaggcagcggaagaggucuuu

SEQ ID NO: 852 - RNA, 21 nt, RNAi-antisense strand
agaccucuuccgcugccucuu

SEQ ID NO: 853 - DNA, 21 bp, Homo sapiens
aagaggtcttgcagatacttg

SEQ ID NO: 854 - RNA, 21 nt, RNAi-sense strand
gaggucuugcagauacuuguu

SEQ ID NO: 855 - RNA, 21 nt, RNAi-antisense strand
caaguaucugcaagaccucuu

SEQ ID NO: 856 - DNA, 21 bp, Homo sapiens
aagaactcctggcaattcctg

SEQ ID NO: 857 - RNA, 21 nt, RNAi-sense strand
gaacuccuggcaauuccuguu

SEQ ID NO: 858 - RNA, 21 nt, RNAi-antisense strand
caggaauugccaggaguucuu

SEQ ID NO: 859 - DNA, 21 bp, Homo sapiens
aactcctggcaattcctgttg

SEQ ID NO: 860 - RNA, 21 nt, RNAi-sense strand
cuccuggcaauuccuguuguu

SEQ ID NO: 861 - RNA, 21 nt, RNAi-antisense strand
caacaggaauugccaggaguu

SEQ ID NO: 862 - DNA, 21 bp, Homo sapiens
aattcctgttgttaaaggaag

SEQ ID NO: 863 - RNA, 21 nt, RNAi-sense strand
uuccuguuguuaaaggaaguu

SEQ ID NO: 864 - RNA, 21 nt, RNAi-antisense strand
cuuccuuuaacaacaggaauu

SEQ ID NO: 865 - DNA, 21 bp, Homo sapiens
aaatttgcaggaggagactat

SEQ ID NO: 866 - RNA, 21 nt, RNAi-sense strand
auuugcaggaggagacuauuu

SEQ ID NO: 867 - RNA, 21 nt, RNAi-antisense strand
auagucuccuccugcaaauuu

SEQ ID NO: 868 - DNA, 21 bp, Homo sapiens
aatttgcaggaggagactata

SEQ ID NO: 869 - RNA, 21 nt, RNAi-sense strand
uuugcaggaggagacuauauu

SEQ ID NO: 870 - RNA, 21 nt, RNAi-antisense strand
uauagucuccuccugcaaauu

SEQ ID NO: 871 - DNA, 21 bp, Homo sapiens
aagcatttatatctgctagtg

SEQ ID NO: 872 - RNA, 21 nt, RNAi-sense strand
gcauuuauaucugcuaguguu

SEQ ID NO: 873 - RNA, 21 nt, RNAi-antisense strand
cacuagcagauauaaaugcuu

SEQ ID NO: 874 - DNA, 21 bp, Homo sapiens
aagatccaaagataccaggag

SEQ ID NO: 875 - RNA, 21 nt, RNAi-sense strand
gauccaaagauaccaggaguu

SEQ ID NO: 876 - RNA, 21 nt, RNAi-antisense strand
cuccugguaucuuuggaucuu

SEQ ID NO: 877 - DNA, 21 bp, Homo sapiens
aaagataccaggagagaagca

SEQ ID NO: 878 - RNA, 21 nt, RNAi-sense strand
agauaccaggagagaagcauu

SEQ ID NO: 879 - RNA, 21 nt, RNAi-antisense strand
ugcuucucuccugguaucuuu

SEQ ID NO: 880 - DNA, 21 bp, Homo sapiens
aagataccaggagagaagcaa

SEQ ID NO: 881 - RNA, 21 nt, RNAi-sense strand
gauaccaggagagaagcaauu

SEQ ID NO: 882 - RNA, 21 nt, RNAi-antisense strand
uugcuucucuccugguaucuu

SEQ ID NO: 883 - DNA, 21 bp, Homo sapiens
aactcgaactattggtgttat

SEQ ID NO: 884 - RNA, 21 nt, RNAi-sense strand
cucgaacuauugguguuauuu

SEQ ID NO: 885 - RNA, 21 nt, RNAi-antisense strand
auaacaccaauaguucgaguu

SEQ ID NO: 886 - DNA, 21 bp, Homo sapiens
aactattggtgttatgaccat

SEQ ID NO: 887 - RNA, 21 nt, RNAi-sense strand
cuauugguguuaugaccauuu

SEQ ID NO: 888 - RNA, 21 nt, RNAi-antisense strand
auggucauaacaccaauaguu

SEQ ID NO: 889 - DNA, 21 bp, Homo sapiens
aatgcactttctgaagaagac

SEQ ID NO: 890 - RNA, 21 nt, RNAi-sense strand
ugcacuuucugaagaagacuu

SEQ ID NO: 891 - RNA, 21 nt, RNAi-antisense strand
gucuucuucagaaagugcauu

SEQ ID NO: 892 - DNA, 21 bp, Homo sapiens
aagaagacaaagaagcgctga

SEQ ID NO: 893 - RNA, 21 nt, RNAi-sense strand
gaagacaaagaagcgcugauu

SEQ ID NO: 894 - RNA, 21 nt, RNAi-antisense strand
ucagcgcuucuuugucuucuu

SEQ ID NO: 895 - DNA, 21 bp, Homo sapiens
aagacaaagaagcgctgattg

SEQ ID NO: 896 - RNA, 21 nt, RNAi-sense strand
gacaaagaagcgcugauuguu

SEQ ID NO: 897 - RNA, 21 nt, RNAi-antisense strand
caaucagcgcuucuuugucuu

SEQ ID NO: 898 - DNA, 21 bp, Homo sapiens
aaatgcaatgattatcgaagg

SEQ ID NO: 899 - RNA, 21 nt, RNAi-sense strand
augcaaugauuaucgaagguu

SEQ ID NO: 900 - RNA, 21 nt, RNAi-antisense strand
ccuucgauaaucauugcauuu

SEQ ID NO: 901 - DNA, 21 bp, Homo sapiens
aatgcaatgattatcgaaggc

SEQ ID NO: 902 - RNA, 21 nt, RNAi-sense strand
ugcaaugauuaucgaaggcuu

SEQ ID NO: 903 - RNA, 21 nt, RNAi-antisense strand
gccuucgauaaucauugcauu

SEQ ID NO: 904 - DNA, 21 bp, Homo sapiens
aatgattatcgaaggcgatta

SEQ ID NO: 905 - RNA, 21 nt, RNAi-sense strand
ugauuaucgaaggcgauuauu

SEQ ID NO: 906 - RNA, 21 nt, RNAi-antisense strand
uaaucgccuucgauaaucauu

SEQ ID NO: 907 - DNA, 21 bp, Homo sapiens
aaggcgattactcagtgttaa

SEQ ID NO: 908 - RNA, 21 nt, RNAi-sense strand
ggcgauuacucaguguuaauu

SEQ ID NO: 909 - RNA, 21 nt, RNAi-antisense strand
uuaacacugaguaaucgccuu

SEQ ID NO: 910 - DNA, 21 bp, Homo sapiens
aacatccgcgttagagctgat

SEQ ID NO: 911 - RNA, 21 nt, RNAi-sense strand
cauccgcguuagagcugauuu

SEQ ID NO: 912 - RNA, 21 nt, RNAi-antisense strand
aucagcucuaacgcggauguu

SEQ ID NO: 913 - DNA, 21 bp, Homo sapiens
aattattctccaggttggaaa

SEQ ID NO: 914 - RNA, 21 nt, RNAi-sense strand
uuauucuccagguuggaaauu

SEQ ID NO: 915 - RNA, 21 nt, RNAi-antisense strand
uuuccaaccuggagaauaauu

SEQ ID NO: 916 - DNA, 21 bp, Homo sapiens
aagagctgtcagtttgtagcc

SEQ ID NO: 917 - RNA, 21 nt, RNAi-sense strand
gagcugucaguuuguagccuu

SEQ ID NO: 918 - RNA, 21 nt, RNAi-antisense strand
ggcuacaaacugacagcucuu

SEQ ID NO: 919 - DNA, 21 bp, Homo sapiens
aaatgaggcagagactaaact

SEQ ID NO: 920 - RNA, 21 nt, RNAi-sense strand
augaggcagagacuaaacuuu

SEQ ID NO: 921 - RNA, 21 nt, RNAi-antisense strand
aguuuagucucugccucauuu

SEQ ID NO: 922 - DNA, 21 bp, Homo sapiens
aatgaggcagagactaaactt

SEQ ID NO: 923 - RNA, 21 nt, RNAi-sense strand
ugaggcagagacuaaacuuuu

SEQ ID NO: 924 - RNA, 21 nt, RNAi-antisense strand
aaguuuagucucugccucauu

SEQ ID NO: 925 - DNA, 21 bp, Homo sapiens
aagaccttaagactcatatgg

SEQ ID NO: 926 - RNA, 21 nt, RNAi-sense strand
gaccuuaagacucauaugguu

SEQ ID NO: 927 - RNA, 21 nt, RNAi-antisense strand
ccauaugagucuuaaggucuu

SEQ ID NO: 928 - DNA, 21 bp, Homo sapiens
aagactcatatggttgtggct

SEQ ID NO: 929 - RNA, 21 nt, RNAi-sense strand
gacucauaugguuguggcuuu

SEQ ID NO: 930 - RNA, 21 nt, RNAi-antisense strand
agccacaaccauaugagucuu

SEQ ID NO: 931 - DNA, 21 bp, Homo sapiens
aatacaatggaagactttcag

SEQ ID NO: 932 - RNA, 21 nt, RNAi-sense strand
uacaauggaagacuuucaguu

SEQ ID NO: 933 - RNA, 21 nt, RNAi-antisense strand
cugaaagucuuccauuguauu

SEQ ID NO: 934 - DNA, 21 bp, Homo sapiens
aatggaagactttcagaagat

SEQ ID NO: 935 - RNA, 21 nt, RNAi-sense strand
uggaagacuuucagaagauuu

SEQ ID NO: 936 - RNA, 21 nt, RNAi-antisense strand
aucuucugaaagucuuccauu

SEQ ID NO: 937 - DNA, 21 bp, Homo sapiens
aagactttcagaagatactag

SEQ ID NO: 938 - RNA, 21 nt, RNAi-sense strand
gacuuucagaagauacuaguu

SEQ ID NO: 939 - RNA, 21 nt, RNAi-antisense strand
cuaguaucuucugaaagucuu

SEQ ID NO: 940 - DNA, 21 bp, Homo sapiens
aagatactagattctggaaag

SEQ ID NO: 941 - RNA, 21 nt, RNAi-sense strand
gauacuagauucuggaaaguu

SEQ ID NO: 942 - RNA, 21 nt, RNAi-antisense strand
cuuuccagaaucuaguaucuu

SEQ ID NO: 943 - DNA, 21 bp, Homo sapiens
aagattgttcagattccattc

SEQ ID NO: 944 - RNA, 21 nt, RNAi-sense strand
gauuguucagauuccauucuu

SEQ ID NO: 945 - RNA, 21 nt, RNAi-antisense strand
gaauggaaucugaacaaucuu

SEQ ID NO: 946 - DNA, 21 bp, Homo sapiens
aaattgactgtgaggactgga

SEQ ID NO: 947 - RNA, 21 nt, RNAi-sense strand
auugacugugaggacuggauu

SEQ ID NO: 948 - RNA, 21 nt, RNAi-antisense strand
uccaguccucacagucaauuu

SEQ ID NO: 949 - DNA, 21 bp, Homo sapiens
aattgactgtgaggactggat

SEQ ID NO: 950 - RNA, 21 nt, RNAi-sense strand
uugacugugaggacuggauuu

SEQ ID NO: 951 - RNA, 21 nt, RNAi-antisense strand
auccaguccucacagucaauu

SEQ ID NO: 952 - DNA, 21 bp, Homo sapiens
aagatcttgaacctggtgctc

SEQ ID NO: 953 - RNA, 21 nt, RNAi-sense strand
gaucuugaaccuggugcucuu

SEQ ID NO: 954 - RNA, 21 nt, RNAi-antisense strand
gagcaccagguucaagaucuu

SEQ ID NO: 955 - DNA, 21 bp, Homo sapiens
aacctggtgctccatccatgg

SEQ ID NO: 956 - RNA, 21 nt, RNAi-sense strand
ccuggugcuccauccaugguu

SEQ ID NO: 957 - RNA, 21 nt, RNAi-antisense strand
ccauggauggagcaccagguu

SEQ ID NO: 958 - DNA, 21 bp, Homo sapiens
aaaccactctgtgaactgcag

SEQ ID NO: 959 - RNA, 21 nt, RNAi-sense strand
accacucugugaacugcaguu

SEQ ID NO: 960 - RNA, 21 nt, RNAi-antisense strand
cugcaguucacagagugguuu

SEQ ID NO: 961 - DNA, 21 bp, Homo sapiens
aaccactctgtgaactgcagc

SEQ ID NO: 962 - RNA, 21 nt, RNAi-sense strand
ccacucugugaacugcagcuu

SEQ ID NO: 963 - RNA, 21 nt, RNAi-antisense strand
gcugcaguucacagagugguu

SEQ ID NO: 964 - DNA, 21 bp, Homo sapiens
aactgcagcctggagccaaat

SEQ ID NO: 965 - RNA, 21 nt, RNAi-sense strand
cugcagccuggagccaaauuu

SEQ ID NO: 966 - RNA, 21 nt, RNAi-antisense strand
auuuggcuccaggcugcaguu

SEQ ID NO: 967 - DNA, 21 bp, Homo sapiens
aaatgtgtctgtggcaagaac

SEQ ID NO: 968 - RNA, 21 nt, RNAi-sense strand
augugucuguggcaagaacuu

SEQ ID NO: 969 - RNA, 21 nt, RNAi-antisense strand
guucuugccacagacacauuu

SEQ ID NO: 970 - DNA, 21 bp, Homo sapiens
aatgtgtctgtggcaagaacc

SEQ ID NO: 971 - RNA, 21 nt, RNAi-sense strand
ugugucuguggcaagaaccuu

SEQ ID NO: 972 - RNA, 21 nt, RNAi-antisense strand
gguucuugccacagacacauu

SEQ ID NO: 973 - DNA, 21 bp, Homo sapiens
aagtactacaccttatttggt

SEQ ID NO: 974 - RNA, 21 nt, RNAi-sense strand
guacuacaccuuauuugguuu

SEQ ID NO: 975 - RNA, 21 nt, RNAi-antisense strand
accaaauaagguguaguacuu

SEQ ID NO: 976 - DNA, 21 bp, Homo sapiens
aaatgaagtcacacaggacaa

SEQ ID NO: 977 - RNA, 21 nt, RNAi-sense strand
augaagucacacaggacaauu

SEQ ID NO: 978 - RNA, 21 nt, RNAi-antisense strand
uuguccugugugacuucauuu

SEQ ID NO: 979 - DNA, 21 bp, Homo sapiens
aatgaagtcacacaggacaat

SEQ ID NO: 980 - RNA, 21 nt, RNAi-sense strand
ugaagucacacaggacaauuu

SEQ ID NO: 981 - RNA, 21 nt, RNAi-antisense strand
auuguccugugugacuucauu

SEQ ID NO: 982 - DNA, 21 bp, Homo sapiens
aagtcacacaggacaattatt

SEQ ID NO: 983 - RNA, 21 nt, RNAi-sense strand
gucacacaggacaauuauuuu

SEQ ID NO: 984 - RNA, 21 nt, RNAi-antisense strand
aauaauuguccugugugacuu

SEQ ID NO: 985 - DNA, 21 bp, Homo sapiens
catactgagattgatcactgg

SEQ ID NO: 986 - RNA, 21 nt, RNAi-sense strand
uacugagauugaucacugguu

SEQ ID NO: 987 - RNA, 21 nt, RNAi-antisense strand
ccagugaucaaucucaguauu

SEQ ID NO: 988 - DNA, 21 bp, Homo sapiens
cactggttggagttcagtgct

SEQ ID NO: 989 - RNA, 21 nt, RNAi-sense strand
cugguuggaguucagugcuuu

SEQ ID NO: 990 - RNA, 21 nt, RNAi-antisense strand
agcacugaacuccaaccaguu

SEQ ID NO: 991 - DNA, 21 bp, Homo sapiens
catgtgattcctttacttcta

SEQ ID NO: 992 - RNA, 21 nt, RNAi-sense strand
ugugauuccuuuacuucuauu

SEQ ID NO: 993 - RNA, 21 nt, RNAi-antisense strand
uagaaguaaaggaaucacauu

SEQ ID NO: 994 - DNA, 21 bp, Homo sapiens
caatcattgcctgtctctgag

SEQ ID NO: 995 - RNA, 21 nt, RNAi-sense strand
aucauugccugucucugaguu

SEQ ID NO: 996 - RNA, 21 nt, RNAi-antisense strand
cucagagacaggcaaugauuu

SEQ ID NO: 997 - DNA, 21 bp, Homo sapiens
cattgcctgtctctgagaaca

SEQ ID NO: 998 - RNA, 21 nt, RNAi-sense strand
uugccugucucugagaacauu

SEQ ID NO: 999 - RNA, 21 nt, RNAi-antisense strand
uguucucagagacaggcaauu

SEQ ID NO: 1000 - DNA, 21 bp, Homo sapiens
catacttagttggaaactcct

SEQ ID NO: 1001 - RNA, 21 nt, RNAi-sense strand
uacuuaguuggaaacuccuuu

SEQ ID NO: 1002 - RNA, 21 nt, RNAi-antisense strand
aggaguuuccaacuaaguauu

SEQ ID NO: 1003 - DNA, 21 bp, Homo sapiens
caagaacagttgaaacagaag

SEQ ID NO: 1004 - RNA, 21 nt, RNAi-sense strand
agaacaguugaaacagaaguu

SEQ ID NO: 1005 - RNA, 21 nt, RNAi-antisense strand
cuucuguuucaacuguucuuu

SEQ ID NO: 1006 - DNA, 21 bp, Homo sapiens
cagttgaaacagaagaaagct

SEQ ID NO: 1007 - RNA, 21 nt, RNAi-sense strand
guugaaacagaagaaagcuuu

SEQ ID NO: 1008 - RNA, 21 nt, RNAi-antisense strand
agcuuucuucuguuucaacuu

SEQ ID NO: 1009 - DNA, 21 bp, Homo sapiens
cagaagaaagctccagttcat

SEQ ID NO: 1010 - RNA, 21 nt, RNAi-sense strand
gaagaaagcuccaguucauuu

SEQ ID NO: 1011 - RNA, 21 nt, RNAi-antisense strand
augaacuggagcuuucuucuu

SEQ ID NO: 1012 - DNA, 21 bp, Homo sapiens
cagcaggccttccagtcagta

SEQ ID NO: 1013 - RNA, 21 nt, RNAi-sense strand
gcaggccuuccagucaguauu

SEQ ID NO: 1014 - RNA, 21 nt, RNAi-antisense strand
uacugacuggaaggccugcuu

SEQ ID NO: 1015 - DNA, 21 bp, Homo sapiens
caggccttccagtcagtaggt

SEQ ID NO: 1016 - RNA, 21 nt, RNAi-sense strand
ggccuuccagucaguagguuu

SEQ ID NO: 1017 - RNA, 21 nt, RNAi-antisense strand
accuacugacuggaaggccuu

SEQ ID NO: 1018 - DNA, 21 bp, Homo sapiens
cagtcagtaggtaccaagtgg

SEQ ID NO: 1019 - RNA, 21 nt, RNAi-sense strand
gucaguagguaccaagugguu

SEQ ID NO: 1020 - RNA, 21 nt, RNAi-antisense strand
ccacuugguaccuacugacuu

SEQ ID NO: 1021 - DNA, 21 bp, Homo sapiens
caacaaccaaagctcgagtgg

SEQ ID NO: 1022 - RNA, 21 nt, RNAi-sense strand
acaaccaaagcucgagugguu

SEQ ID NO: 1023 - RNA, 21 nt, RNAi-antisense strand
ccacucgagcuuugguuguuu

SEQ ID NO: 1024 - DNA, 21 bp, Homo sapiens
caaccaaagctcgagtggcac

SEQ ID NO: 1025 - RNA, 21 nt, RNAi-sense strand
accaaagcucgaguggcacuu

SEQ ID NO: 1026 - RNA, 21 nt, RNAi-antisense strand
gugccacucgagcuuugguuu

SEQ ID NO: 1027 - DNA, 21 bp, Homo sapiens
caaagctcgagtggcacctga

SEQ ID NO: 1028 - RNA, 21 nt, RNAi-sense strand
aagcucgaguggcaccugauu

SEQ ID NO: 1029 - RNA, 21 nt, RNAi-antisense strand
ucaggugccacucgagcuuuu

SEQ ID NO: 1030 - DNA, 21 bp, Homo sapiens
cagatttcctccagaggccag

SEQ ID NO: 1031 - RNA, 21 nt, RNAi-sense strand
gauuuccuccagaggccaguu

SEQ ID NO: 1032 - RNA, 21 nt, RNAi-antisense strand
cuggccucuggaggaaaucuu

SEQ ID NO: 1033 - DNA, 21 bp, Homo sapiens
cagaggccagtggttacttac

SEQ ID NO: 1034 - RNA, 21 nt, RNAi-sense strand
gaggccagugguuacuuacuu

SEQ ID NO: 1035 - RNA, 21 nt, RNAi-antisense strand
guaaguaaccacuggccucuu

SEQ ID NO: 1036 - DNA, 21 bp, Homo sapiens
cagtggttacttacacattgg

SEQ ID NO: 1037 - RNA, 21 nt, RNAi-sense strand
gugguuacuuacacauugguu

SEQ ID NO: 1038 - RNA, 21 nt, RNAi-antisense strand
ccaauguguaaguaaccacuu

SEQ ID NO: 1039 - DNA, 21 bp, Homo sapiens
cagcactaccaggttaacttt

SEQ ID NO: 1040 - RNA, 21 nt, RNAi-sense strand
gcacuaccagguuaacuuuuu

SEQ ID NO: 1041 - RNA, 21 nt, RNAi-antisense strand
aaaguuaaccugguagugcuu

SEQ ID NO: 1042 - DNA, 21 bp, Homo sapiens
cactaccaggttaactttaaa

SEQ ID NO: 1043 - RNA, 21 nt, RNAi-sense strand
cuaccagguuaacuuuaaauu

SEQ ID NO: 1044 - RNA, 21 nt, RNAi-antisense strand
uuuaaaguuaaccugguaguu

SEQ ID NO: 1045 - DNA, 21 bp, Homo sapiens
catgagatttgatgacacaaa

SEQ ID NO: 1046 - RNA, 21 nt, RNAi-sense strand
ugagauuugaugacacaaauu

SEQ ID NO: 1047 - RNA, 21 nt, RNAi-antisense strand
uuugugucaucaaaucucauu

SEQ ID NO: 1048 - DNA, 21 bp, Homo sapiens
caatgttgcatatcaaaccag

SEQ ID NO: 1049 - RNA, 21 nt, RNAi-sense strand
auguugcauaucaaaccaguu

SEQ ID NO: 1050 - RNA, 21 nt, RNAi-antisense strand
cugguuugauaugcaacauuu

SEQ ID NO: 1051 - DNA, 21 bp, Homo sapiens
cagagaagctaattcaagaag

SEQ ID NO: 1052 - RNA, 21 nt, RNAi-sense strand
gagaagcuaauucaagaaguu

SEQ ID NO: 1053 - RNA, 21 nt, RNAi-antisense strand
cuucuugaauuagcuucucuu

SEQ ID NO: 1054 - DNA, 21 bp, Homo sapiens
cagatgaaagcagaacgtgag

SEQ ID NO: 1055 - RNA, 21 nt, RNAi-sense strand
gaugaaagcagaacgugaguu

SEQ ID NO: 1056 - RNA, 21 nt, RNAi-antisense strand
cucacguucugcuuucaucuu

SEQ ID NO: 1057 - DNA, 21 bp, Homo sapiens
cagaacgtgagcagaggatag

SEQ ID NO: 1058 - RNA, 21 nt, RNAi-sense strand
gaacgugagcagaggauaguu

SEQ ID NO: 1059 - RNA, 21 nt, RNAi-antisense strand
cuauccucugcucacguucuu

SEQ ID NO: 1060 - DNA, 21 bp, Homo sapiens
cagaggatagaatctaaacat

SEQ ID NO: 1061 - RNA, 21 nt, RNAi-sense strand
gaggauagaaucuaaacauuu

SEQ ID NO: 1062 - RNA, 21 nt, RNAi-antisense strand
auguuuagauucuauccucuu

SEQ ID NO: 1063 - DNA, 21 bp, Homo sapiens
cagtttggtcactcctgttgt

SEQ ID NO: 1064 - RNA, 21 nt, RNAi-sense strand
guuuggucacuccuguuguuu

SEQ ID NO: 1065 - RNA, 21 nt, RNAi-antisense strand
acaacaggagugaccaaacuu

SEQ ID NO: 1066 - DNA, 21 bp, Homo sapiens
cactcctgttgtttgcgagca

SEQ ID NO: 1067 - RNA, 21 nt, RNAi-sense strand
cuccuguuguuugcgagcauu

SEQ ID NO: 1068 - RNA, 21 nt, RNAi-antisense strand
ugcucgcaaacaacaggaguu

SEQ ID NO: 1069 - DNA, 21 bp, Homo sapiens
catgagtagtaacaatggatg

SEQ ID NO: 1070 - RNA, 21 nt, RNAi-sense strand
ugaguaguaacaauggauguu

SEQ ID NO: 1071 - RNA, 21 nt, RNAi-antisense strand
cauccauuguuacuacucauu

SEQ ID NO: 1072 - DNA, 21 bp, Homo sapiens
caatggatgcatgagagatcc

SEQ ID NO: 1073 - RNA, 21 nt, RNAi-sense strand
auggaugcaugagagauccuu

SEQ ID NO: 1074 - RNA, 21 nt, RNAi-antisense strand
ggaucucucaugcauccauuu

SEQ ID NO: 1075 - DNA, 21 bp, Homo sapiens
caaccacatccaagaactgga

SEQ ID NO: 1076 - RNA, 21 nt, RNAi-sense strand
accacauccaagaacuggauu

SEQ ID NO: 1077 - RNA, 21 nt, RNAi-antisense strand
uccaguucuuggaugugguuu

SEQ ID NO: 1078 - DNA, 21 bp, Homo sapiens
cacatccaagaactggaaata

SEQ ID NO: 1079 - RNA, 21 nt, RNAi-sense strand
cauccaagaacuggaaauauu

SEQ ID NO: 1080 - RNA, 21 nt, RNAi-antisense strand
uauuuccaguucuuggauguu

SEQ ID NO: 1081 - DNA, 21 bp, Homo sapiens
catccaagaactggaaataaa

SEQ ID NO: 1082 - RNA, 21 nt, RNAi-sense strand
uccaagaacuggaaauaaauu

SEQ ID NO: 1083 - RNA, 21 nt, RNAi-antisense strand
uuuauuuccaguucuuggauu

SEQ ID NO: 1084 - DNA, 21 bp, Homo sapiens
catagttgacagcatcgaagg

SEQ ID NO: 1085 - RNA, 21 nt, RNAi-sense strand
uaguugacagcaucgaagguu

SEQ ID NO: 1086 - RNA, 21 nt, RNAi-antisense strand
ccuucgaugcugucaacuauu

SEQ ID NO: 1087 - DNA, 21 bp, Homo sapiens
cagcatcgaaggtgttacaca

SEQ ID NO: 1088 - RNA, 21 nt, RNAi-sense strand
gcaucgaagguguuacacauu

SEQ ID NO: 1089 - RNA, 21 nt, RNAi-antisense strand
uguguaacaccuucgaugcuu

SEQ ID NO: 1090 - DNA, 21 bp, Homo sapiens
catcgaaggtgttacacatgc

SEQ ID NO: 1091 - RNA, 21 nt, RNAi-sense strand
ucgaagguguuacacaugcuu

SEQ ID NO: 1092 - RNA, 21 nt, RNAi-antisense strand
gcauguguaacaccuucgauu

SEQ ID NO: 1093 - DNA, 21 bp, Homo sapiens
caacagaataccatgacagag

SEQ ID NO: 1094 - RNA, 21 nt, RNAi-sense strand
acagaauaccaugacagaguu

SEQ ID NO: 1095 - RNA, 21 nt, RNAi-antisense strand
cucugucaugguauucuguuu

SEQ ID NO: 1096 - DNA, 21 bp, Homo sapiens
cagaataccatgacagagatg

SEQ ID NO: 1097 - RNA, 21 nt, RNAi-sense strand
gaauaccaugacagagauguu

SEQ ID NO: 1098 - RNA, 21 nt, RNAi-antisense strand
caucucugucaugguauucuu

SEQ ID NO: 1099 - DNA, 21 bp, Homo sapiens
catgacagagatgagcagttt

SEQ ID NO: 1100 - RNA, 21 nt, RNAi-sense strand
ugacagagaugagcaguuuuu

SEQ ID NO: 1101 - RNA, 21 nt, RNAi-antisense strand
aaacugcucaucucugucauu

SEQ ID NO: 1102 - DNA, 21 bp, Homo sapiens
caacaacacagtgctatccaa

SEQ ID NO: 1103 - RNA, 21 nt, RNAi-sense strand
acaacacagugcuauccaauu

SEQ ID NO: 1104 - RNA, 21 nt, RNAi-antisense strand
uuggauagcacuguguuguuu

SEQ ID NO: 1105 - DNA, 21 bp, Homo sapiens
cacatggtttgtcaatgaagg

SEQ ID NO: 1106 - RNA, 21 nt, RNAi-sense strand
caugguuugucaaugaagguu

SEQ ID NO: 1107 - RNA, 21 nt, RNAi-antisense strand
ccuucauugacaaaccauguu

SEQ ID NO: 1108 - DNA, 21 bp, Homo sapiens
catggtttgtcaatgaaggac

SEQ ID NO: 1109 - RNA, 21 nt, RNAi-sense strand
ugguuugucaaugaaggacuu

SEQ ID NO: 1110 - RNA, 21 nt, RNAi-antisense strand
guccuucauugacaaaccauu

SEQ ID NO: 1111 - DNA, 21 bp, Homo sapiens
caatgaaggactagtagatgg

SEQ ID NO: 1112 - RNA, 21 nt, RNAi-sense strand
augaaggacuaguagaugguu

SEQ ID NO: 1113 - RNA, 21 nt, RNAi-antisense strand
ccaucuacuaguccuucauuu

SEQ ID NO: 1114 - DNA, 21 bp, Homo sapiens
caagatttcctacggttcgtg

SEQ ID NO: 1115 - RNA, 21 nt, RNAi-sense strand
agauuuccuacgguucguguu

SEQ ID NO: 1116 - RNA, 21 nt, RNAi-antisense strand
cacgaaccguaggaaaucuuu

SEQ ID NO: 1117 - DNA, 21 bp, Homo sapiens
cagttgaaggactgaaacagt

SEQ ID NO: 1118 - RNA, 21 nt, RNAi-sense strand
guugaaggacugaaacaguuu

SEQ ID NO: 1119 - RNA, 21 nt, RNAi-antisense strand
acuguuucaguccuucaacuu

SEQ ID NO: 1120 - DNA, 21 bp, Homo sapiens
cacgttcagtcgtgaacatgg

SEQ ID NO: 1121 - RNA, 21 nt, RNAi-sense strand
cguucagucgugaacaugguu

SEQ ID NO: 1122 - RNA, 21 nt, RNAi-antisense strand
ccauguucacgacugaacguu

SEQ ID NO: 1123 - DNA, 21 bp, Homo sapiens
cagtggctccacgatatgttg

SEQ ID NO: 1124 - RNA, 21 nt, RNAi-sense strand
guggcuccacgauauguuguu

SEQ ID NO: 1125 - RNA, 21 nt, RNAi-antisense strand
caacauaucguggagccacuu

SEQ ID NO: 1126 - DNA, 21 bp, Homo sapiens
cacgatatgttgcattactga

SEQ ID NO: 1127 - RNA, 21 nt, RNAi-sense strand
cgauauguugcauuacugauu

SEQ ID NO: 1128 - RNA, 21 nt, RNAi-antisense strand
ucaguaaugcaacauaucguu

SEQ ID NO: 1129 - DNA, 21 bp, Homo sapiens
cattactgaagaaagaagtga

SEQ ID NO: 1130 - RNA, 21 nt, RNAi-sense strand
uuacugaagaaagaagugauu

SEQ ID NO: 1131 - RNA, 21 nt, RNAi-antisense strand
ucacuucuuucuucaguaauu

SEQ ID NO: 1132 - DNA, 21 bp, Homo sapiens
cagtgaatgtacctgaagctc

SEQ ID NO: 1133 - RNA, 21 nt, RNAi-sense strand
gugaauguaccugaagcucuu

SEQ ID NO: 1134 - RNA, 21 nt, RNAi-antisense strand
gagcuucagguacauucacuu

SEQ ID NO: 1135 - DNA, 21 bp, Homo sapiens
caggaggagatgaaagaagta

SEQ ID NO: 1136 - RNA, 21 nt, RNAi-sense strand
ggaggagaugaaagaaguauu

SEQ ID NO: 1137 - RNA, 21 nt, RNAi-antisense strand
uacuucuuucaucuccuccuu

SEQ ID NO: 1138 - DNA, 21 bp, Homo sapiens
caaagaatcctgaggttggct

SEQ ID NO: 1139 - RNA, 21 nt, RNAi-sense strand
aagaauccugagguuggcuuu

SEQ ID NO: 1140 - RNA, 21 nt, RNAi-antisense strand
agccaaccucaggauucuuuu

SEQ ID NO: 1141 - DNA, 21 bp, Homo sapiens
cattgaaggtgctgatgcaga

SEQ ID NO: 1142 - RNA, 21 nt, RNAi-sense strand
uugaaggugcugaugcagauu

SEQ ID NO: 1143 - RNA, 21 nt, RNAi-antisense strand
ucugcaucagcaccuucaauu

SEQ ID NO: 1144 - DNA, 21 bp, Homo sapiens
catatctcttgatgcaaagtt

SEQ ID NO: 1145 - RNA, 21 nt, RNAi-sense strand
uaucucuugaugcaaaguuuu

SEQ ID NO: 1146 - RNA, 21 nt, RNAi-antisense strand
aacuuugcaucaagagauauu

SEQ ID NO: 1147 - DNA, 21 bp, Homo sapiens
cactaaggtcacttggcttgc

SEQ ID NO: 1148 - RNA, 21 nt, RNAi-sense strand
cuaaggucacuuggcuugcuu

SEQ ID NO: 1149 - RNA, 21 nt, RNAi-antisense strand
gcaagccaagugaccuuaguu

SEQ ID NO: 1150 - DNA, 21 bp, Homo sapiens
cacttggcttgcagagactac

SEQ ID NO: 1151 - RNA, 21 nt, RNAi-sense strand
cuuggcuugcagagacuacuu

SEQ ID NO: 1152 - RNA, 21 nt, RNAi-antisense strand
guagucucugcaagccaaguu

SEQ ID NO: 1153 - DNA, 21 bp, Homo sapiens
cagagactacacatgctcttc

SEQ ID NO: 1154 - RNA, 21 nt, RNAi-sense strand
gagacuacacaugcucuucuu

SEQ ID NO: 1155 - RNA, 21 nt, RNAi-antisense strand
gaagagcauguguagucucuu

SEQ ID NO: 1156 - DNA, 21 bp, Homo sapiens
cacatgctcttcctattccag

SEQ ID NO: 1157 - RNA, 21 nt, RNAi-sense strand
caugcucuuccuauuccaguu

SEQ ID NO: 1158 - RNA, 21 nt, RNAi-antisense strand
cuggaauaggaagagcauguu

SEQ ID NO: 1159 - DNA, 21 bp, Homo sapiens
catgctcttcctattccagta

SEQ ID NO: 1160 - RNA, 21 nt, RNAi-sense strand
ugcucuuccuauuccaguauu

SEQ ID NO: 1161 - RNA, 21 nt, RNAi-antisense strand
uacuggaauaggaagagcauu

SEQ ID NO: 1162 - DNA, 21 bp, Homo sapiens
cagtaatctgtgtcacttatg

SEQ ID NO: 1163 - RNA, 21 nt, RNAi-sense strand
guaaucugugucacuuauguu

SEQ ID NO: 1164 - RNA, 21 nt, RNAi-antisense strand
cauaagugacacagauuacuu

SEQ ID NO: 1165 - DNA, 21 bp, Homo sapiens
cacttatgagcacttgatcac

SEQ ID NO: 1166 - RNA, 21 nt, RNAi-sense strand
cuuaugagcacuugaucacuu

SEQ ID NO: 1167 - RNA, 21 nt, RNAi-antisense strand
gugaucaagugcucauaaguu

SEQ ID NO: 1168 - DNA, 21 bp, Homo sapiens
cacttgatcacaaagccagtg

SEQ ID NO: 1169 - RNA, 21 nt, RNAi-sense strand
cuugaucacaaagccaguguu

SEQ ID NO: 1170 - RNA, 21 nt, RNAi-antisense strand
cacuggcuuugugaucaaguu

SEQ ID NO: 1171 - DNA, 21 bp, Homo sapiens
cacaaagccagtgctaggaaa

SEQ ID NO: 1172 - RNA, 21 nt, RNAi-sense strand
caaagccagugcuaggaaauu

SEQ ID NO: 1173 - RNA, 21 nt, RNAi-antisense strand
uuuccuagcacuggcuuuguu

SEQ ID NO: 1174 - DNA, 21 bp, Homo sapiens
cagtatgtcaacaagaacagt

SEQ ID NO: 1175 - RNA, 21 nt, RNAi-sense strand
guaugucaacaagaacaguuu

SEQ ID NO: 1176 - RNA, 21 nt, RNAi-antisense strand
acuguucuuguugacauacuu

SEQ ID NO: 1177 - DNA, 21 bp, Homo sapiens
caacaagaacagtaagcatga

SEQ ID NO: 1178 - RNA, 21 nt, RNAi-sense strand
acaagaacaguaagcaugauu

SEQ ID NO: 1179 - RNA, 21 nt, RNAi-antisense strand
ucaugcuuacuguucuuguuu

SEQ ID NO: 1180 - DNA, 21 bp, Homo sapiens
caagaacagtaagcatgaaga

SEQ ID NO: 1181 - RNA, 21 nt, RNAi-sense strand
agaacaguaagcaugaagauu

SEQ ID NO: 1182 - RNA, 21 nt, RNAi-antisense strand
ucuucaugcuuacuguucuuu

SEQ ID NO: 1183 - DNA, 21 bp, Homo sapiens
cagtaagcatgaagagctaat

SEQ ID NO: 1184 - RNA, 21 nt, RNAi-sense strand
guaagcaugaagagcuaauuu

SEQ ID NO: 1185 - RNA, 21 nt, RNAi-antisense strand
auuagcucuucaugcuuacuu

SEQ ID NO: 1186 - DNA, 21 bp, Homo sapiens
caactccagagaagaggattc

SEQ ID NO: 1187 - RNA, 21 nt, RNAi-sense strand
acuccagagaagaggauucuu

SEQ ID NO: 1188 - RNA, 21 nt, RNAi-antisense strand
gaauccucuucucuggaguuu

SEQ ID NO: 1189 - DNA, 21 bp, Homo sapiens
cagagaagaggattcttcata

SEQ ID NO: 1190 - RNA, 21 nt, RNAi-sense strand
gagaagaggauucuucauauu

SEQ ID NO: 1191 - RNA, 21 nt, RNAi-antisense strand
uaugaagaauccucuucucuu

SEQ ID NO: 1192 - DNA, 21 bp, Homo sapiens
catatgtgatcaaccttatga

SEQ ID NO: 1193 - RNA, 21 nt, RNAi-sense strand
uaugugaucaaccuuaugauu

SEQ ID NO: 1194 - RNA, 21 nt, RNAi-antisense strand
ucauaagguugaucacauauu

SEQ ID NO: 1195 - DNA, 21 bp, Homo sapiens
caaccttatgaacctgttagc

SEQ ID NO: 1196 - RNA, 21 nt, RNAi-sense strand
accuuaugaaccuguuagcuu

SEQ ID NO: 1197 - RNA, 21 nt, RNAi-antisense strand
gcuaacagguucauaagguuu

SEQ ID NO: 1198 - DNA, 21 bp, Homo sapiens
cacacaaaggaaatgccaaca

SEQ ID NO: 1199 - RNA, 21 nt, RNAi-sense strand
cacaaaggaaaugccaacauu

SEQ ID NO: 1200 - RNA, 21 nt, RNAi-antisense strand
uguuggcauuuccuuuguguu

SEQ ID NO: 1201 - DNA, 21 bp, Homo sapiens
cacaaaggaaatgccaacatc

SEQ ID NO: 1202 - RNA, 21 nt, RNAi-sense strand
caaaggaaaugccaacaucuu

SEQ ID NO: 1203 - RNA, 21 nt, RNAi-antisense strand
gauguuggcauuuccuuuguu

SEQ ID NO: 1204 - DNA, 21 bp, Homo sapiens
caaaggaaatgccaacatcag

SEQ ID NO: 1205 - RNA, 21 nt, RNAi-sense strand
aaggaaaugccaacaucaguu

SEQ ID NO: 1206 - RNA, 21 nt, RNAi-antisense strand
cugauguuggcauuuccuuuu

SEQ ID NO: 1207 - DNA, 21 bp, Homo sapiens
caacaccttctctgaataata

SEQ ID NO: 1208 - RNA, 21 nt, RNAi-sense strand
acaccuucucugaauaauauu

SEQ ID NO: 1209 - RNA, 21 nt, RNAi-antisense strand
uauuauucagagaagguguuu

SEQ ID NO: 1210 - DNA, 21 bp, Homo sapiens
catctgaggattccttggtcc

SEQ ID NO: 1211 - RNA, 21 nt, RNAi-sense strand
ucugaggauuccuugguccuu

SEQ ID NO: 1212 - RNA, 21 nt, RNAi-antisense strand
ggaccaaggaauccucagauu

SEQ ID NO: 1213 - DNA, 21 bp, Homo sapiens
caatagagtggctgttcaagg

SEQ ID NO: 1214 - RNA, 21 nt, RNAi-sense strand
auagaguggcuguucaagguu

SEQ ID NO: 1215 - RNA, 21 nt, RNAi-antisense strand
ccuugaacagccacucuauuu

SEQ ID NO: 1216 - DNA, 21 bp, Homo sapiens
caaggagatgtggttcgtgaa

SEQ ID NO: 1217 - RNA, 21 nt, RNAi-sense strand
aggagaugugguucgugaauu

SEQ ID NO: 1218 - RNA, 21 nt, RNAi-antisense strand
uucacgaaccacaucuccuuu

SEQ ID NO: 1219 - DNA, 21 bp, Homo sapiens
caagaaagcaccaaaggaaga

SEQ ID NO: 1220 - RNA, 21 nt, RNAi-sense strand
agaaagcaccaaaggaagauu

SEQ ID NO: 1221 - RNA, 21 nt, RNAi-antisense strand
ucuuccuuuggugcuuucuuu

SEQ ID NO: 1222 - DNA, 21 bp, Homo sapiens
caccaaaggaagatgtagatg

SEQ ID NO: 1223 - RNA, 21 nt, RNAi-sense strand
ccaaaggaagauguagauguu

SEQ ID NO: 1224 - RNA, 21 nt, RNAi-antisense strand
caucuacaucuuccuuugguu

SEQ ID NO: 1225 - DNA, 21 bp, Homo sapiens
caaaggaagatgtagatgcag

SEQ ID NO: 1226 - RNA, 21 nt, RNAi-sense strand
aaggaagauguagaugcaguu

SEQ ID NO: 1227 - RNA, 21 nt, RNAi-antisense strand
cugcaucuacaucuuccuuuu

SEQ ID NO: 1228 - DNA, 21 bp, Homo sapiens
caggaatataaacctggaaac

SEQ ID NO: 1229 - RNA, 21 nt, RNAi-sense strand
ggaauauaaaccuggaaacuu

SEQ ID NO: 1230 - RNA, 21 nt, RNAi-antisense strand
guuuccagguuuauauuccuu

SEQ ID NO: 1231 - DNA, 21 bp, Homo sapiens
cagcaagtattctggaaagta

SEQ ID NO: 1232 - RNA, 21 nt, RNAi-sense strand
gcaaguauucuggaaaguauu

SEQ ID NO: 1233 - RNA, 21 nt, RNAi-antisense strand
uacuuuccagaauacuugcuu

SEQ ID NO: 1234 - DNA, 21 bp, Homo sapiens
cattatctcaaagttcggatt

SEQ ID NO: 1235 - RNA, 21 nt, RNAi-sense strand
uuaucucaaaguucggauuuu

SEQ ID NO: 1236 - RNA, 21 nt, RNAi-antisense strand
aauccgaacuuugagauaauu

SEQ ID NO: 1237 - DNA, 21 bp, Homo sapiens
caaccagaaattctgaacctg

SEQ ID NO: 1238 - RNA, 21 nt, RNAi-sense strand
accagaaauucugaaccuguu

SEQ ID NO: 1239 - RNA, 21 nt, RNAi-antisense strand
cagguucagaauuucugguuu

SEQ ID NO: 1240 - DNA, 21 bp, Homo sapiens
cagaaattctgaacctgctgg

SEQ ID NO: 1241 - RNA, 21 nt, RNAi-sense strand
gaaauucugaaccugcugguu

SEQ ID NO: 1242 - RNA, 21 nt, RNAi-antisense strand
ccagcagguucagaauuucuu

SEQ ID NO: 1243 - DNA, 21 bp, Homo sapiens
caccagaagcgaaagtacttt

SEQ ID NO: 1244 - RNA, 21 nt, RNAi-sense strand
ccagaagcgaaaguacuuuuu

SEQ ID NO: 1245 - RNA, 21 nt, RNAi-antisense strand
aaaguacuuucgcuucugguu

SEQ ID NO: 1246 - DNA, 21 bp, Homo sapiens
caagtagatatagctgttcaa

SEQ ID NO: 1247 - RNA, 21 nt, RNAi-sense strand
aguagauauagcuguucaauu

SEQ ID NO: 1248 - RNA, 21 nt, RNAi-antisense strand
uugaacagcuauaucuacuuu

SEQ ID NO: 1249 - DNA, 21 bp, Homo sapiens
caagaactccttcagctaaag

SEQ ID NO: 1250 - RNA, 21 nt, RNAi-sense strand
agaacuccuucagcuaaaguu

SEQ ID NO: 1251 - RNA, 21 nt, RNAi-antisense strand
cuuuagcugaaggaguucuuu

SEQ ID NO: 1252 - DNA, 21 bp, Homo sapiens
cagctaaaggcacagtacaag

SEQ ID NO: 1253 - RNA, 21 nt, RNAi-sense strand
gcuaaaggcacaguacaaguu

SEQ ID NO: 1254 - RNA, 21 nt, RNAi-antisense strand
cuuguacugugccuuuagcuu

SEQ ID NO: 1255 - DNA, 21 bp, Homo sapiens
cacagtacaagtctttgatag

SEQ ID NO: 1256 - RNA, 21 nt, RNAi-sense strand
caguacaagucuuugauaguu

SEQ ID NO: 1257 - RNA, 21 nt, RNAi-antisense strand
cuaucaaagacuuguacuguu

SEQ ID NO: 1258 - DNA, 21 bp, Homo sapiens
cagtacaagtctttgatagga

SEQ ID NO: 1259 - RNA, 21 nt, RNAi-sense strand
guacaagucuuugauaggauu

SEQ ID NO: 1260 - RNA, 21 nt, RNAi-antisense strand
uccuaucaaagacuuguacuu

SEQ ID NO: 1261 - DNA, 21 bp, Homo sapiens
caagtctttgataggagtaga

SEQ ID NO: 1262 - RNA, 21 nt, RNAi-sense strand
agucuuugauaggaguagauu

SEQ ID NO: 1263 - RNA, 21 nt, RNAi-antisense strand
ucuacuccuaucaaagacuuu

SEQ ID NO: 1264 - DNA, 21 bp, Homo sapiens
cactggagctgaggacaaaga

SEQ ID NO: 1265 - RNA, 21 nt, RNAi-sense strand
cuggagcugaggacaaagauu

SEQ ID NO: 1266 - RNA, 21 nt, RNAi-antisense strand
ucuuuguccucagcuccaguu

SEQ ID NO: 1267 - DNA, 21 bp, Homo sapiens
cagaataagcctcagaaacaa

SEQ ID NO: 1268 - RNA, 21 nt, RNAi-sense strand
gaauaagccucagaaacaauu

SEQ ID NO: 1269 - RNA, 21 nt, RNAi-antisense strand
uuguuucugaggcuuauucuu

SEQ ID NO: 1270 - DNA, 21 bp, Homo sapiens
catcaagtggagcaggagaag

SEQ ID NO: 1271 - RNA, 21 nt, RNAi-sense strand
ucaaguggagcaggagaaguu

SEQ ID NO: 1272 - RNA, 21 nt, RNAi-antisense strand
cuucuccugcuccacuugauu

SEQ ID NO: 1273 - DNA, 21 bp, Homo sapiens
caggtcatcacaaagtcagaa

SEQ ID NO: 1274 - RNA, 21 nt, RNAi-sense strand
ggucaucacaaagucagaauu

SEQ ID NO: 1275 - RNA, 21 nt, RNAi-antisense strand
uucugacuuugugaugaccuu

SEQ ID NO: 1276 - DNA, 21 bp, Homo sapiens
catcacaaagtcagaaatgat

SEQ ID NO: 1277 - RNA, 21 nt, RNAi-sense strand
ucacaaagucagaaaugauuu

SEQ ID NO: 1278 - RNA, 21 nt, RNAi-antisense strand
aucauuucugacuuugugauu

SEQ ID NO: 1279 - DNA, 21 bp, Homo sapiens
cacaaagtcagaaatgattga

SEQ ID NO: 1280 - RNA, 21 nt, RNAi-sense strand
caaagucagaaaugauugauu

SEQ ID NO: 1281 - RNA, 21 nt, RNAi-antisense strand
ucaaucauuucugacuuuguu

SEQ ID NO: 1282 - DNA, 21 bp, Homo sapiens
cagaaatgattgaataccatg

SEQ ID NO: 1283 - RNA, 21 nt, RNAi-sense strand
gaaaugauugaauaccauguu

SEQ ID NO: 1284 - RNA, 21 nt, RNAi-antisense strand
caugguauucaaucauuucuu

SEQ ID NO: 1285 - DNA, 21 bp, Homo sapiens
catgacataagtggctgttat

SEQ ID NO: 1286 - RNA, 21 nt, RNAi-sense strand
ugacauaaguggcuguuauuu

SEQ ID NO: 1287 - RNA, 21 nt, RNAi-antisense strand
auaacagccacuuaugucauu

SEQ ID NO: 1288 - DNA, 21 bp, Homo sapiens
cataagtggctgttatattct

SEQ ID NO: 1289 - RNA, 21 nt, RNAi-sense strand
uaaguggcuguuauauucuuu

SEQ ID NO: 1290 - RNA, 21 nt, RNAi-antisense strand
agaauauaacagccacuuauu

SEQ ID NO: 1291 - DNA, 21 bp, Homo sapiens
catgtttgtgtctcaaagtgc

SEQ ID NO: 1292 - RNA, 21 nt, RNAi-sense strand
uguuugugucucaaagugcuu

SEQ ID NO: 1293 - RNA, 21 nt, RNAi-antisense strand
gcacuuugagacacaaacauu

SEQ ID NO: 1294 - DNA, 21 bp, Homo sapiens
caaagtgcattagagaaagag

SEQ ID NO: 1295 - RNA, 21 nt, RNAi-sense strand
aagugcauuagagaaagaguu

SEQ ID NO: 1296 - RNA, 21 nt, RNAi-antisense strand
cucuuucucuaaugcacuuuu

SEQ ID NO: 1297 - DNA, 21 bp, Homo sapiens
cattagagaaagagaagactc

SEQ ID NO: 1298 - RNA, 21 nt, RNAi-sense strand
uuagagaaagagaagacucuu

SEQ ID NO: 1299 - RNA, 21 nt, RNAi-antisense strand
gagucuucucuuucucuaauu

SEQ ID NO: 1300 - DNA, 21 bp, Homo sapiens
cagaaccaattgccattcgtc

SEQ ID NO: 1301 - RNA, 21 nt, RNAi-sense strand
gaaccaauugccauucgucuu

SEQ ID NO: 1302 - RNA, 21 nt, RNAi-antisense strand
gacgaauggcaauugguucuu

SEQ ID NO: 1303 - DNA, 21 bp, Homo sapiens
caattgccattcgtcctacta

SEQ ID NO: 1304 - RNA, 21 nt, RNAi-sense strand
auugccauucguccuacuauu

SEQ ID NO: 1305 - RNA, 21 nt, RNAi-antisense strand
uaguaggacgaauggcaauuu

SEQ ID NO: 1306 - DNA, 21 bp, Homo sapiens
cattcgtcctactagtgaaac

SEQ ID NO: 1307 - RNA, 21 nt, RNAi-sense strand
uucguccuacuagugaaacuu

SEQ ID NO: 1308 - RNA, 21 nt, RNAi-antisense strand
guuucacuaguaggacgaauu

SEQ ID NO: 1309 - DNA, 21 bp, Homo sapiens
cagtaatgtatcctgcatatg

SEQ ID NO: 1310 - RNA, 21 nt, RNAi-sense strand
guaauguauccugcauauguu

SEQ ID NO: 1311 - RNA, 21 nt, RNAi-antisense strand
cauaugcaggauacauuacuu

SEQ ID NO: 1312 - DNA, 21 bp, Homo sapiens
catcaagctcaatcagtggtg

SEQ ID NO: 1313 - RNA, 21 nt, RNAi-sense strand
ucaagcucaaucagugguguu

SEQ ID NO: 1314 - RNA, 21 nt, RNAi-antisense strand
caccacugauugagcuugauu

SEQ ID NO: 1315 - DNA, 21 bp, Homo sapiens
caagctcaatcagtggtgcaa

SEQ ID NO: 1316 - RNA, 21 nt, RNAi-sense strand
agcucaaucaguggugcaauu

SEQ ID NO: 1317 - RNA, 21 nt, RNAi-antisense strand
uugcaccacugauugagcuuu

SEQ ID NO: 1318 - DNA, 21 bp, Homo sapiens
caatcagtggtgcaatgtggt

SEQ ID NO: 1319 - RNA, 21 nt, RNAi-sense strand
aucaguggugcaaugugguuu

SEQ ID NO: 1320 - RNA, 21 nt, RNAi-antisense strand
accacauugcaccacugauuu

SEQ ID NO: 1321 - DNA, 21 bp, Homo sapiens
cagtggtgcaatgtggtgcgt

SEQ ID NO: 1322 - RNA, 21 nt, RNAi-sense strand
guggugcaauguggugcguuu

SEQ ID NO: 1323 - RNA, 21 nt, RNAi-antisense strand
acgcaccacauugcaccacuu

SEQ ID NO: 1324 - DNA, 21 bp, Homo sapiens
caagcatcctcagcctttcct

SEQ ID NO: 1325 - RNA, 21 nt, RNAi-sense strand
agcauccucagccuuuccuuu

SEQ ID NO: 1326 - RNA, 21 nt, RNAi-antisense strand
aggaaaggcugaggaugcuuu

SEQ ID NO: 1327 - DNA, 21 bp, Homo sapiens
catcctcagcctttcctacgt

SEQ ID NO: 1328 - RNA, 21 nt, RNAi-sense strand
uccucagccuuuccuacguuu

SEQ ID NO: 1329 - RNA, 21 nt, RNAi-antisense strand
acguaggaaaggcugaggauu

SEQ ID NO: 1330 - DNA, 21 bp, Homo sapiens
cagcctttcctacgtactcgt

SEQ ID NO: 1331 - RNA, 21 nt, RNAi-sense strand
gccuuuccuacguacucguuu

SEQ ID NO: 1332 - RNA, 21 nt, RNAi-antisense strand
acgaguacguaggaaaggcuu

SEQ ID NO: 1333 - DNA, 21 bp, Homo sapiens
catggaagaggcagcggaaga

SEQ ID NO: 1334 - RNA, 21 nt, RNAi-sense strand
uggaagaggcagcggaagauu

SEQ ID NO: 1335 - RNA, 21 nt, RNAi-antisense strand
ucuuccgcugccucuuccauu

SEQ ID NO: 1336 - DNA, 21 bp, Homo sapiens
cagcggaagaggtcttgcaga

SEQ ID NO: 1337 - RNA, 21 nt, RNAi-sense strand
gcggaagaggucuugcagauu

SEQ ID NO: 1338 - RNA, 21 nt, RNAi-antisense strand
ucugcaagaccucuuccgcuu

SEQ ID NO: 1339 - DNA, 21 bp, Homo sapiens
cagatacttgacttatatgct

SEQ ID NO: 1340 - RNA, 21 nt, RNAi-sense strand
gauacuugacuuauaugcuuu

SEQ ID NO: 1341 - RNA, 21 nt, RNAi-antisense strand
agcauauaagucaaguaucuu

SEQ ID NO: 1342 - DNA, 21 bp, Homo sapiens
caggtatatgaagaactcctg

SEQ ID NO: 1343 - RNA, 21 nt, RNAi-sense strand
gguauaugaagaacuccuguu

SEQ ID NO: 1344 - RNA, 21 nt, RNAi-antisense strand
caggaguucuucauauaccuu

SEQ ID NO: 1345 - DNA, 21 bp, Homo sapiens
caattcctgttgttaaaggaa

SEQ ID NO: 1346 - RNA, 21 nt, RNAi-sense strand
auuccuguuguuaaaggaauu

SEQ ID NO: 1347 - RNA, 21 nt, RNAi-antisense strand
uuccuuuaacaacaggaauuu

SEQ ID NO: 1348 - DNA, 21 bp, Homo sapiens
caggaggagactatacaacta

SEQ ID NO: 1349 - RNA, 21 nt, RNAi-sense strand
ggaggagacuauacaacuauu

SEQ ID NO: 1350 - RNA, 21 nt, RNAi-antisense strand
uaguuguauagucuccuccuu

SEQ ID NO: 1351 - DNA, 21 bp, Homo sapiens
catttatatctgctagtggaa

SEQ ID NO: 1352 - RNA, 21 nt, RNAi-sense strand
uuuauaucugcuaguggaauu

SEQ ID NO: 1353 - RNA, 21 nt, RNAi-antisense strand
uuccacuagcagauauaaauu

SEQ ID NO: 1354 - DNA, 21 bp, Homo sapiens
caaagataccaggagagaagc

SEQ ID NO: 1355 - RNA, 21 nt, RNAi-sense strand
aagauaccaggagagaagcuu

SEQ ID NO: 1356 - RNA, 21 nt, RNAi-antisense strand
gcuucucuccugguaucuuuu

SEQ ID NO: 1357 - DNA, 21 bp, Homo sapiens
caggagagaagcaatttgcct

SEQ ID NO: 1358 - RNA, 21 nt, RNAi-sense strand
ggagagaagcaauuugccuuu

SEQ ID NO: 1359 - RNA, 21 nt, RNAi-antisense strand
aggcaaauugcuucucuccuu

SEQ ID NO: 1360 - DNA, 21 bp, Homo sapiens
caactcgaactattggtgtta

SEQ ID NO: 1361 - RNA, 21 nt, RNAi-sense strand
acucgaacuauugguguuauu

SEQ ID NO: 1362 - RNA, 21 nt, RNAi-antisense strand
uaacaccaauaguucgaguuu

SEQ ID NO: 1363 - DNA, 21 bp, Homo sapiens
catgtgttcaggtggtgatta

SEQ ID NO: 1364 - RNA, 21 nt, RNAi-sense strand
uguguucagguggugauuauu

SEQ ID NO: 1365 - RNA, 21 nt, RNAi-antisense strand
uaaucaccaccugaacacauu

SEQ ID NO: 1366 - DNA, 21 bp, Homo sapiens
caggtggtgattattccttgt

SEQ ID NO: 1367 - RNA, 21 nt, RNAi-sense strand
gguggugauuauuccuuguuu

SEQ ID NO: 1368 - RNA, 21 nt, RNAi-antisense strand
acaaggaauaaucaccaccuu

SEQ ID NO: 1369 - DNA, 21 bp, Homo sapiens
cattaccaatgcactttctga

SEQ ID NO: 1370 - RNA, 21 nt, RNAi-sense strand
uuaccaaugcacuuucugauu

SEQ ID NO: 1371 - RNA, 21 nt, RNAi-antisense strand
ucagaaagugcauugguaauu

SEQ ID NO: 1372 - DNA, 21 bp, Homo sapiens
caatgcactttctgaagaaga

SEQ ID NO: 1373 - RNA, 21 nt, RNAi-sense strand
augcacuuucugaagaagauu

SEQ ID NO: 1374 - RNA, 21 nt, RNAi-antisense strand
ucuucuucagaaagugcauuu

SEQ ID NO: 1375 - DNA, 21 bp, Homo sapiens
cactttctgaagaagacaaag

SEQ ID NO: 1376 - RNA, 21 nt, RNAi-sense strand
cuuucugaagaagacaaaguu

SEQ ID NO: 1377 - RNA, 21 nt, RNAi-antisense strand
cuuugucuucuucagaaaguu

SEQ ID NO: 1378 - DNA, 21 bp, Homo sapiens
caaagaagcgctgattgcaaa

SEQ ID NO: 1379 - RNA, 21 nt, RNAi-sense strand
aagaagcgcugauugcaaauu

SEQ ID NO: 1380 - RNA, 21 nt, RNAi-antisense strand
uuugcaaucagcgcuucuuuu

SEQ ID NO: 1381 - DNA, 21 bp, Homo sapiens
caatgattatcgaaggcgatt

SEQ ID NO: 1382 - RNA, 21 nt, RNAi-sense strand
augauuaucgaaggcgauuuu

SEQ ID NO: 1383 - RNA, 21 nt, RNAi-antisense strand
aaucgccuucgauaaucauuu

SEQ ID NO: 1384 - DNA, 21 bp, Homo sapiens
cagtgttaacatccgcgttag

SEQ ID NO: 1385 - RNA, 21 nt, RNAi-sense strand
guguuaacauccgcguuaguu

SEQ ID NO: 1386 - RNA, 21 nt, RNAi-antisense strand
cuaacgcggauguuaacacuu

SEQ ID NO: 1387 - DNA, 21 bp, Homo sapiens
catccgcgttagagctgattt

SEQ ID NO: 1388 - RNA, 21 nt, RNAi-sense strand
uccgcguuagagcugauuuuu

SEQ ID NO: 1389 - RNA, 21 nt, RNAi-antisense strand
aaaucagcucuaacgcggauu

SEQ ID NO: 1390 - DNA, 21 bp, Homo sapiens
caggttggaaattcaatcact

SEQ ID NO: 1391 - RNA, 21 nt, RNAi-sense strand
gguuggaaauucaaucacuuu

SEQ ID NO: 1392 - RNA, 21 nt, RNAi-antisense strand
agugauugaauuuccaaccuu

SEQ ID NO: 1393 - DNA, 21 bp, Homo sapiens
cacgtgatatgaagagctgtc

SEQ ID NO: 1394 - RNA, 21 nt, RNAi-sense strand
cgugauaugaagagcugucuu

SEQ ID NO: 1395 - RNA, 21 nt, RNAi-antisense strand
gacagcucuucauaucacguu

SEQ ID NO: 1396 - DNA, 21 bp, Homo sapiens
cagtttgtagccgtcagacga

SEQ ID NO: 1397 - RNA, 21 nt, RNAi-sense strand
guuuguagccgucagacgauu

SEQ ID NO: 1398 - RNA, 21 nt, RNAi-antisense strand
ucgucugacggcuacaaacuu

SEQ ID NO: 1399 - DNA, 21 bp, Homo sapiens
cagagactaaacttcaagcta

SEQ ID NO: 1400 - RNA, 21 nt, RNAi-sense strand
gagacuaaacuucaagcuauu

SEQ ID NO: 1401 - RNA, 21 nt, RNAi-antisense strand
uagcuugaaguuuagucucuu

SEQ ID NO: 1402 - DNA, 21 bp, Homo sapiens
catatggttgtggctaataca

SEQ ID NO: 1403 - RNA, 21 nt, RNAi-sense strand
uaugguuguggcuaauacauu

SEQ ID NO: 1404 - RNA, 21 nt, RNAi-antisense strand
uguauuagccacaaccauauu

SEQ ID NO: 1405 - DNA, 21 bp, Homo sapiens
caatggaagactttcagaaga

SEQ ID NO: 1406 - RNA, 21 nt, RNAi-sense strand
auggaagacuuucagaagauu

SEQ ID NO: 1407 - RNA, 21 nt, RNAi-antisense strand
ucuucugaaagucuuccauuu

SEQ ID NO: 1408 - DNA, 21 bp, Homo sapiens
cagaagatactagattctgga

SEQ ID NO: 1409 - RNA, 21 nt, RNAi-sense strand
gaagauacuagauucuggauu

SEQ ID NO: 1410 - RNA, 21 nt, RNAi-antisense strand
uccagaaucuaguaucuucuu

SEQ ID NO: 1411 - DNA, 21 bp, Homo sapiens
caagatcttgaacctggtgct

SEQ ID NO: 1412 - RNA, 21 nt, RNAi-sense strand
agaucuugaaccuggugcuuu

SEQ ID NO: 1413 - RNA, 21 nt, RNAi-antisense strand
agcaccagguucaagaucuuu

SEQ ID NO: 1414 - DNA, 21 bp, Homo sapiens
caaaccactctgtgaactgca

SEQ ID NO: 1415 - RNA, 21 nt, RNAi-sense strand
aaccacucugugaacugcauu

SEQ ID NO: 1416 - RNA, 21 nt, RNAi-antisense strand
ugcaguucacagagugguuuu

SEQ ID NO: 1417 - DNA, 21 bp, Homo sapiens
cactctgtgaactgcagcctg

SEQ ID NO: 1418 - RNA, 21 nt, RNAi-sense strand
cucugugaacugcagccuguu

SEQ ID NO: 1419 - RNA, 21 nt, RNAi-antisense strand
caggcugcaguucacagaguu

SEQ ID NO: 1420 - DNA, 21 bp, Homo sapiens
cagcctggagccaaatgtgtc

SEQ ID NO: 1421 - RNA, 21 nt, RNAi-sense strand
gccuggagccaaaugugucuu

SEQ ID NO: 1422 - RNA, 21 nt, RNAi-antisense strand
gacacauuuggcuccaggcuu

SEQ ID NO: 1423 - DNA, 21 bp, Homo sapiens
caaatgtgtctgtggcaagaa

SEQ ID NO: 1424 - RNA, 21 nt, RNAi-sense strand
aaugugucuguggcaagaauu

SEQ ID NO: 1425 - RNA, 21 nt, RNAi-antisense strand
uucuugccacagacacauuuu

SEQ ID NO: 1426 - DNA, 21 bp, Homo sapiens
caagtactacaccttatttgg

SEQ ID NO: 1427 - RNA, 21 nt, RNAi-sense strand
aguacuacaccuuauuugguu

SEQ ID NO: 1428 - RNA, 21 nt, RNAi-antisense strand
ccaaauaagguguaguacuuu

SEQ ID NO: 1429 - DNA, 21 bp, Homo sapiens
caccttatttggtcgcagcta

SEQ ID NO: 1430 - RNA, 21 nt, RNAi-sense strand
ccuuauuuggucgcagcuauu

SEQ ID NO: 1431 - RNA, 21 nt, RNAi-antisense strand
uagcugcgaccaaauaagguu

SEQ ID NO: 1432 - DNA, 21 bp, Homo sapiens
cacacaggacaattattctta

SEQ ID NO: 1433 - RNA, 21 nt, RNAi-sense strand
cacaggacaauuauucuuauu

SEQ ID NO: 1434 - RNA, 21 nt, RNAi-antisense strand
uaagaauaauuguccuguguu

SEQ ID NO: 1435 - DNA, 21 bp, Homo sapiens
cacaggacaattattcttatg

SEQ ID NO: 1436 - RNA, 21 nt, RNAi-sense strand
caggacaauuauucuuauguu

SEQ ID NO: 1437 - RNA, 21 nt, RNAi-antisense strand
cauaagaauaauuguccuguu

SEQ ID NO: 1438 - DNA, 21 bp, Homo sapiens
caggacaattattcttatgcc

SEQ ID NO: 1439 - RNA, 21 nt, RNAi-sense strand
ggacaauuauucuuaugccuu

SEQ ID NO: 1440 - RNA, 21 nt, RNAi-antisense strand
ggcauaagaauaauuguccuu

SEQ ID NO: 1441 - DNA, 21 bp, Homo sapiens
gatggaacatactgagattga

SEQ ID NO: 1442 - RNA, 21 nt, RNAi-sense strand
uggaacauacugagauugauu

SEQ ID NO: 1443 - RNA, 21 nt, RNAi-antisense strand
ucaaucucaguauguuccauu

SEQ ID NO: 1444 - DNA, 21 bp, Homo sapiens
gaacatactgagattgatcac

SEQ ID NO: 1445 - RNA, 21 nt, RNAi-sense strand
acauacugagauugaucacuu

SEQ ID NO: 1446 - RNA, 21 nt, RNAi-antisense strand
gugaucaaucucaguauguuu

SEQ ID NO: 1447 - DNA, 21 bp, Homo sapiens
gagattgatcactggttggag

SEQ ID NO: 1448 - RNA, 21 nt, RNAi-sense strand
gauugaucacugguuggaguu

SEQ ID NO: 1449 - RNA, 21 nt, RNAi-antisense strand
cuccaaccagugaucaaucuu

SEQ ID NO: 1450 - DNA, 21 bp, Homo sapiens
gattgatcactggttggagtt

SEQ ID NO: 1451 - RNA, 21 nt, RNAi-sense strand
uugaucacugguuggaguuuu

SEQ ID NO: 1452 - RNA, 21 nt, RNAi-antisense strand
aacuccaaccagugaucaauu

SEQ ID NO: 1453 - DNA, 21 bp, Homo sapiens
gatcactggttggagttcagt

SEQ ID NO: 1454 - RNA, 21 nt, RNAi-sense strand
ucacugguuggaguucaguuu

SEQ ID NO: 1455 - RNA, 21 nt, RNAi-antisense strand
acugaacuccaaccagugauu

SEQ ID NO: 1456 - DNA, 21 bp, Homo sapiens
gaactcaatcattgcctgtct

SEQ ID NO: 1457 - RNA, 21 nt, RNAi-sense strand
acucaaucauugccugucuuu

SEQ ID NO: 1458 - RNA, 21 nt, RNAi-antisense strand
agacaggcaaugauugaguuu

SEQ ID NO: 1459 - DNA, 21 bp, Homo sapiens
gagaacatacttagttggaaa

SEQ ID NO: 1460 - RNA, 21 nt, RNAi-sense strand
gaacauacuuaguuggaaauu

SEQ ID NO: 1461 - RNA, 21 nt, RNAi-antisense strand
uuuccaacuaaguauguucuu

SEQ ID NO: 1462 - DNA, 21 bp, Homo sapiens
gaacatacttagttggaaact

SEQ ID NO: 1463 - RNA, 21 nt, RNAi-sense strand
acauacuuaguuggaaacuuu

SEQ ID NO: 1464 - RNA, 21 nt, RNAi-antisense strand
aguuuccaacuaaguauguuu

SEQ ID NO: 1465 - DNA, 21 bp, Homo sapiens
gaaactccttgagtttagcag

SEQ ID NO: 1466 - RNA, 21 nt, RNAi-sense strand
aacuccuugaguuuagcaguu

SEQ ID NO: 1467 - RNA, 21 nt, RNAi-antisense strand
cugcuaaacucaaggaguuuu

SEQ ID NO: 1468 - DNA, 21 bp, Homo sapiens
gagtttagcagatttatgtgt

SEQ ID NO: 1469 - RNA, 21 nt, RNAi-sense strand
guuuagcagauuuauguguuu

SEQ ID NO: 1470 - RNA, 21 nt, RNAi-antisense strand
acacauaaaucugcuaaacuu

SEQ ID NO: 1471 - DNA, 21 bp, Homo sapiens
gaaatgctgcctggcaagaac

SEQ ID NO: 1472 - RNA, 21 nt, RNAi-sense strand
aaugcugccuggcaagaacuu

SEQ ID NO: 1473 - RNA, 21 nt, RNAi-antisense strand
guucuugccaggcagcauuuu

SEQ ID NO: 1474 - DNA, 21 bp, Homo sapiens
gaacagttgaaacagaagaaa

SEQ ID NO: 1475 - RNA, 21 nt, RNAi-sense strand
acaguugaaacagaagaaauu

SEQ ID NO: 1476 - RNA, 21 nt, RNAi-antisense strand
uuucuucuguuucaacuguuu

SEQ ID NO: 1477 - DNA, 21 bp, Homo sapiens
gaaacagaagaaagctccagt

SEQ ID NO: 1478 - RNA, 21 nt, RNAi-sense strand
aacagaagaaagcuccaguuu

SEQ ID NO: 1479 - RNA, 21 nt, RNAi-antisense strand
acuggagcuuucuucuguuuu

SEQ ID NO: 1480 - DNA, 21 bp, Homo sapiens
gaagaaagctccagttcatgt

SEQ ID NO: 1481 - RNA, 21 nt, RNAi-sense strand
agaaagcuccaguucauguuu

SEQ ID NO: 1482 - RNA, 21 nt, RNAi-antisense strand
acaugaacuggagcuuucuuu

SEQ ID NO: 1483 - DNA, 21 bp, Homo sapiens
gaaagctccagttcatgtaaa

SEQ ID NO: 1484 - RNA, 21 nt, RNAi-sense strand
aagcuccaguucauguaaauu

SEQ ID NO: 1485 - RNA, 21 nt, RNAi-antisense strand
uuuacaugaacuggagcuuuu

SEQ ID NO: 1486 - DNA, 21 bp, Homo sapiens
gatgtttcaacaaccaaagct

SEQ ID NO: 1487 - RNA, 21 nt, RNAi-sense strand
uguuucaacaaccaaagcuuu

SEQ ID NO: 1488 - RNA, 21 nt, RNAi-antisense strand
agcuuugguuguugaaacauu

SEQ ID NO: 1489 - DNA, 21 bp, Homo sapiens
gaaatttgttgagcttccagg

SEQ ID NO: 1490 - RNA, 21 nt, RNAi-sense strand
aauuuguugagcuuccagguu

SEQ ID NO: 1491 - RNA, 21 nt, RNAi-antisense strand
ccuggaagcucaacaaauuuu

SEQ ID NO: 1492 - DNA, 21 bp, Homo sapiens
gagcttccaggtgcggagatg

SEQ ID NO: 1493 - RNA, 21 nt, RNAi-sense strand
gcuuccaggugcggagauguu

SEQ ID NO: 1494 - RNA, 21 nt, RNAi-antisense strand
caucuccgcaccuggaagcuu

SEQ ID NO: 1495 - DNA, 21 bp, Homo sapiens
gaaaggttaccgtcagatttc

SEQ ID NO: 1496 - RNA, 21 nt, RNAi-sense strand
aagguuaccgucagauuucuu

SEQ ID NO: 1497 - RNA, 21 nt, RNAi-antisense strand
gaaaucugacgguaaccuuuu

SEQ ID NO: 1498 - DNA, 21 bp, Homo sapiens
gatttcctccagaggccagtg

SEQ ID NO: 1499 - RNA, 21 nt, RNAi-sense strand
uuuccuccagaggccaguguu

SEQ ID NO: 1500 - RNA, 21 nt, RNAi-antisense strand
cacuggccucuggaggaaauu

SEQ ID NO: 1501 - DNA, 21 bp, Homo sapiens
gaggccagtggttacttacac

SEQ ID NO: 1502 - RNA, 21 nt, RNAi-sense strand
ggccagugguuacuuacacuu

SEQ ID NO: 1503 - RNA, 21 nt, RNAi-antisense strand
guguaaguaaccacuggccuu

SEQ ID NO: 1504 - DNA, 21 bp, Homo sapiens
gaaccagcactaccaggttaa

SEQ ID NO: 1505 - RNA, 21 nt, RNAi-sense strand
accagcacuaccagguuaauu

SEQ ID NO: 1506 - RNA, 21 nt, RNAi-antisense strand
uuaaccugguagugcugguuu

SEQ ID NO: 1507 - DNA, 21 bp, Homo sapiens
gaaactgatcatgagatttga

SEQ ID NO: 1508 - RNA, 21 nt, RNAi-sense strand
aacugaucaugagauuugauu

SEQ ID NO: 1509 - RNA, 21 nt, RNAi-antisense strand
ucaaaucucaugaucaguuuu

SEQ ID NO: 1510 - DNA, 21 bp, Homo sapiens
gatcatgagatttgatgacac

SEQ ID NO: 1511 - RNA, 21 nt, RNAi-sense strand
ucaugagauuugaugacacuu

SEQ ID NO: 1512 - RNA, 21 nt, RNAi-antisense strand
gugucaucaaaucucaugauu

SEQ ID NO: 1513 - DNA, 21 bp, Homo sapiens
gagatttgatgacacaaatcc

SEQ ID NO: 1514 - RNA, 21 nt, RNAi-sense strand
gauuugaugacacaaauccuu

SEQ ID NO: 1515 - RNA, 21 nt, RNAi-antisense strand
ggauuugugucaucaaaucuu

SEQ ID NO: 1516 - DNA, 21 bp, Homo sapiens
gatttgatgacacaaatcctg

SEQ ID NO: 1517 - RNA, 21 nt, RNAi-sense strand
uuugaugacacaaauccuguu

SEQ ID NO: 1518 - RNA, 21 nt, RNAi-antisense strand
caggauuugugucaucaaauu

SEQ ID NO: 1519 - DNA, 21 bp, Homo sapiens
gagaaggttatcttggaagat

SEQ ID NO: 1520 - RNA, 21 nt, RNAi-sense strand
gaagguuaucuuggaagauuu

SEQ ID NO: 1521 - RNA, 21 nt, RNAi-antisense strand
aucuuccaagauaaccuucuu

SEQ ID NO: 1522 - DNA, 21 bp, Homo sapiens
gaaggttatcttggaagatgt

SEQ ID NO: 1523 - RNA, 21 nt, RNAi-sense strand
agguuaucuuggaagauguuu

SEQ ID NO: 1524 - RNA, 21 nt, RNAi-antisense strand
acaucuuccaagauaaccuuu

SEQ ID NO: 1525 - DNA, 21 bp, Homo sapiens
gaagatgttgcaatgttgcat

SEQ ID NO: 1526 - RNA, 21 nt, RNAi-sense strand
agauguugcaauguugcauuu

SEQ ID NO: 1527 - RNA, 21 nt, RNAi-antisense strand
augcaacauugcaacaucuuu

SEQ ID NO: 1528 - DNA, 21 bp, Homo sapiens
gatgttgcaatgttgcatatc

SEQ ID NO: 1529 - RNA, 21 nt, RNAi-sense strand
uguugcaauguugcauaucuu

SEQ ID NO: 1530 - RNA, 21 nt, RNAi-antisense strand
gauaugcaacauugcaacauu

SEQ ID NO: 1531 - DNA, 21 bp, Homo sapiens
gaagtatgcagagaagctaat

SEQ ID NO: 1532 - RNA, 21 nt, RNAi-sense strand
aguaugcagagaagcuaauuu

SEQ ID NO: 1533 - RNA, 21 nt, RNAi-antisense strand
auuagcuucucugcauacuuu

SEQ ID NO: 1534 - DNA, 21 bp, Homo sapiens
gaaggcttatgtggatgatac

SEQ ID NO: 1535 - RNA, 21 nt, RNAi-sense strand
aggcuuauguggaugauacuu

SEQ ID NO: 1536 - RNA, 21 nt, RNAi-antisense strand
guaucauccacauaagccuuu

SEQ ID NO: 1537 - DNA, 21 bp, Homo sapiens
gatgatactcctgctgaacag

SEQ ID NO: 1538 - RNA, 21 nt, RNAi-sense strand
ugauacuccugcugaacaguu

SEQ ID NO: 1539 - RNA, 21 nt, RNAi-antisense strand
cuguucagcaggaguaucauu

SEQ ID NO: 1540 - DNA, 21 bp, Homo sapiens
gatactcctgctgaacagatg

SEQ ID NO: 1541 - RNA, 21 nt, RNAi-sense strand
uacuccugcugaacagauguu

SEQ ID NO: 1542 - RNA, 21 nt, RNAi-antisense strand
caucuguucagcaggaguauu

SEQ ID NO: 1543 - DNA, 21 bp, Homo sapiens
gaacagatgaaagcagaacgt

SEQ ID NO: 1544 - RNA, 21 nt, RNAi-sense strand
acagaugaaagcagaacguuu

SEQ ID NO: 1545 - RNA, 21 nt, RNAi-antisense strand
acguucugcuuucaucuguuu

SEQ ID NO: 1546 - DNA, 21 bp, Homo sapiens
gatgaaagcagaacgtgagca

SEQ ID NO: 1547 - RNA, 21 nt, RNAi-sense strand
ugaaagcagaacgugagcauu

SEQ ID NO: 1548 - RNA, 21 nt, RNAi-antisense strand
ugcucacguucugcuuucauu

SEQ ID NO: 1549 - DNA, 21 bp, Homo sapiens
gaaagcagaacgtgagcagag

SEQ ID NO: 1550 - RNA, 21 nt, RNAi-sense strand
aagcagaacgugagcagaguu

SEQ ID NO: 1551 - RNA, 21 nt, RNAi-antisense strand
cucugcucacguucugcuuuu

SEQ ID NO: 1552 - DNA, 21 bp, Homo sapiens
gaacgtgagcagaggatagaa

SEQ ID NO: 1553 - RNA, 21 nt, RNAi-sense strand
acgugagcagaggauagaauu

SEQ ID NO: 1554 - RNA, 21 nt, RNAi-antisense strand
uucuauccucugcucacguuu

SEQ ID NO: 1555 - DNA, 21 bp, Homo sapiens
gagcagaggatagaatctaaa

SEQ ID NO: 1556 - RNA, 21 nt, RNAi-sense strand
gcagaggauagaaucuaaauu

SEQ ID NO: 1557 - RNA, 21 nt, RNAi-antisense strand
uuuagauucuauccucugcuu

SEQ ID NO: 1558 - DNA, 21 bp, Homo sapiens
gaggatagaatctaaacatag

SEQ ID NO: 1559 - RNA, 21 nt, RNAi-sense strand
ggauagaaucuaaacauaguu

SEQ ID NO: 1560 - RNA, 21 nt, RNAi-antisense strand
cuauguuuagauucuauccuu

SEQ ID NO: 1561 - DNA, 21 bp, Homo sapiens
gagaagaatctacaaatgtgg

SEQ ID NO: 1562 - RNA, 21 nt, RNAi-sense strand
gaagaaucuacaaaugugguu

SEQ ID NO: 1563 - RNA, 21 nt, RNAi-antisense strand
ccacauuuguagauucuucuu

SEQ ID NO: 1564 - DNA, 21 bp, Homo sapiens
gagccagtttggtcactcctg

SEQ ID NO: 1565 - RNA, 21 nt, RNAi-sense strand
gccaguuuggucacuccuguu

SEQ ID NO: 1566 - RNA, 21 nt, RNAi-antisense strand
caggagugaccaaacuggcuu

SEQ ID NO: 1567 - DNA, 21 bp, Homo sapiens
gacatgagtagtaacaatgga

SEQ ID NO: 1568 - RNA, 21 nt, RNAi-sense strand
caugaguaguaacaauggauu

SEQ ID NO: 1569 - RNA, 21 nt, RNAi-antisense strand
uccauuguuacuacucauguu

SEQ ID NO: 1570 - DNA, 21 bp, Homo sapiens
gagtagtaacaatggatgcat

SEQ ID NO: 1571 - RNA, 21 nt, RNAi-sense strand
guaguaacaauggaugcauuu

SEQ ID NO: 1572 - RNA, 21 nt, RNAi-antisense strand
augcauccauuguuacuacuu

SEQ ID NO: 1573 - DNA, 21 bp, Homo sapiens
gacagcatcgaaggtgttaca

SEQ ID NO: 1574 - RNA, 21 nt, RNAi-sense strand
cagcaucgaagguguuacauu

SEQ ID NO: 1575 - RNA, 21 nt, RNAi-antisense strand
uguaacaccuucgaugcuguu

SEQ ID NO: 1576 - DNA, 21 bp, Homo sapiens
gagaacaacagaataccatga

SEQ ID NO: 1577 - RNA, 21 nt, RNAi-sense strand
gaacaacagaauaccaugauu

SEQ ID NO: 1578 - RNA, 21 nt, RNAi-antisense strand
ucaugguauucuguuguucuu

SEQ ID NO: 1579 - DNA, 21 bp, Homo sapiens
gaacaacagaataccatgaca

SEQ ID NO: 1580 - RNA, 21 nt, RNAi-sense strand
acaacagaauaccaugacauu

SEQ ID NO: 1581 - RNA, 21 nt, RNAi-antisense strand
ugucaugguauucuguuguuu

SEQ ID NO: 1582 - DNA, 21 bp, Homo sapiens
gaataccatgacagagatgag

SEQ ID NO: 1583 - RNA, 21 nt, RNAi-sense strand
auaccaugacagagaugaguu

SEQ ID NO: 1584 - RNA, 21 nt, RNAi-antisense strand
cucaucucugucaugguauuu

SEQ ID NO: 1585 - DNA, 21 bp, Homo sapiens
gattattgaagctttaggcat

SEQ ID NO: 1586 - RNA, 21 nt, RNAi-sense strand
uuauugaagcuuuaggcauuu

SEQ ID NO: 1587 - RNA, 21 nt, RNAi-antisense strand
augccuaaagcuucaauaauu

SEQ ID NO: 1588 - DNA, 21 bp, Homo sapiens
gaatatagtcggctaaatctc

SEQ ID NO: 1589 - RNA, 21 nt, RNAi-sense strand
auauagucggcuaaaucucuu

SEQ ID NO: 1590 - RNA, 21 nt, RNAi-antisense strand
gagauuuagccgacuauauuu

SEQ ID NO: 1591 - DNA, 21 bp, Homo sapiens
gaaggactagtagatggatgg

SEQ ID NO: 1592 - RNA, 21 nt, RNAi-sense strand
aggacuaguagauggaugguu

SEQ ID NO: 1593 - RNA, 21 nt, RNAi-antisense strand
ccauccaucuacuaguccuuu

SEQ ID NO: 1594 - DNA, 21 bp, Homo sapiens
gatttcctacggttcgtggtg

SEQ ID NO: 1595 - RNA, 21 nt, RNAi-sense strand
uuuccuacgguucgugguguu

SEQ ID NO: 1596 - RNA, 21 nt, RNAi-antisense strand
caccacgaaccguaggaaauu

SEQ ID NO: 1597 - DNA, 21 bp, Homo sapiens
gatgacagttgaaggactgaa

SEQ ID NO: 1598 - RNA, 21 nt, RNAi-sense strand
ugacaguugaaggacugaauu

SEQ ID NO: 1599 - RNA, 21 nt, RNAi-antisense strand
uucaguccuucaacugucauu

SEQ ID NO: 1600 - DNA, 21 bp, Homo sapiens
gacagttgaaggactgaaaca

SEQ ID NO: 1601 - RNA, 21 nt, RNAi-sense strand
caguugaaggacugaaacauu

SEQ ID NO: 1602 - RNA, 21 nt, RNAi-antisense strand
uguuucaguccuucaacuguu

SEQ ID NO: 1603 - DNA, 21 bp, Homo sapiens
gaaggactgaaacagtttatt

SEQ ID NO: 1604 - RNA, 21 nt, RNAi-sense strand
aggacugaaacaguuuauuuu

SEQ ID NO: 1605 - RNA, 21 nt, RNAi-antisense strand
aauaaacuguuucaguccuuu

SEQ ID NO: 1606 - DNA, 21 bp, Homo sapiens
gactgaaacagtttattgctg

SEQ ID NO: 1607 - RNA, 21 nt, RNAi-sense strand
cugaaacaguuuauugcuguu

SEQ ID NO: 1608 - RNA, 21 nt, RNAi-antisense strand
cagcaauaaacuguuucaguu

SEQ ID NO: 1609 - DNA, 21 bp, Homo sapiens
gaaacagtttattgctgctca

SEQ ID NO: 1610 - RNA, 21 nt, RNAi-sense strand
aacaguuuauugcugcucauu

SEQ ID NO: 1611 - RNA, 21 nt, RNAi-antisense strand
ugagcagcaauaaacuguuuu

SEQ ID NO: 1612 - DNA, 21 bp, Homo sapiens
gatatgttgcattactgaaga

SEQ ID NO: 1613 - RNA, 21 nt, RNAi-sense strand
uauguugcauuacugaagauu

SEQ ID NO: 1614 - RNA, 21 nt, RNAi-antisense strand
ucuucaguaaugcaacauauu

SEQ ID NO: 1615 - DNA, 21 bp, Homo sapiens
gaatgtacctgaagctcagga

SEQ ID NO: 1616 - RNA, 21 nt, RNAi-sense strand
auguaccugaagcucaggauu

SEQ ID NO: 1617 - RNA, 21 nt, RNAi-antisense strand
uccugagcuucagguacauuu

SEQ ID NO: 1618 - DNA, 21 bp, Homo sapiens
gaagctcaggaggagatgaaa

SEQ ID NO: 1619 - RNA, 21 nt, RNAi-sense strand
agcucaggaggagaugaaauu

SEQ ID NO: 1620 - RNA, 21 nt, RNAi-antisense strand
uuucaucuccuccugagcuuu

SEQ ID NO: 1621 - DNA, 21 bp, Homo sapiens
gaggagatgaaagaagtagcc

SEQ ID NO: 1622 - RNA, 21 nt, RNAi-sense strand
ggagaugaaagaaguagccuu

SEQ ID NO: 1623 - RNA, 21 nt, RNAi-antisense strand
ggcuacuucuuucaucuccuu

SEQ ID NO: 1624 - DNA, 21 bp, Homo sapiens
gagatgaaagaagtagccaaa

SEQ ID NO: 1625 - RNA, 21 nt, RNAi-sense strand
gaugaaagaaguagccaaauu

SEQ ID NO: 1626 - RNA, 21 nt, RNAi-antisense strand
uuuggcuacuucuuucaucuu

SEQ ID NO: 1627 - DNA, 21 bp, Homo sapiens
gatgaaagaagtagccaaaca

SEQ ID NO: 1628 - RNA, 21 nt, RNAi-sense strand
ugaaagaaguagccaaacauu

SEQ ID NO: 1629 - RNA, 21 nt, RNAi-antisense strand
uguuuggcuacuucuuucauu

SEQ ID NO: 1630 - DNA, 21 bp, Homo sapiens
gaatcctgaggttggcttgaa

SEQ ID NO: 1631 - RNA, 21 nt, RNAi-sense strand
auccugagguuggcuugaauu

SEQ ID NO: 1632 - RNA, 21 nt, RNAi-antisense strand
uucaagccaaccucaggauuu

SEQ ID NO: 1633 - DNA, 21 bp, Homo sapiens
gaggttggcttgaagcctgtg

SEQ ID NO: 1634 - RNA, 21 nt, RNAi-sense strand
gguuggcuugaagccuguguu

SEQ ID NO: 1635 - RNA, 21 nt, RNAi-antisense strand
cacaggcuucaagccaaccuu

SEQ ID NO: 1636 - DNA, 21 bp, Homo sapiens
gaagcctgtgtggtatagtcc

SEQ ID NO: 1637 - RNA, 21 nt, RNAi-sense strand
agccugugugguauaguccuu

SEQ ID NO: 1638 - RNA, 21 nt, RNAi-antisense strand
ggacuauaccacacaggcuuu

SEQ ID NO: 1639 - DNA, 21 bp, Homo sapiens
gaaggtgctgatgcagagact

SEQ ID NO: 1640 - RNA, 21 nt, RNAi-sense strand
aggugcugaugcagagacuuu

SEQ ID NO: 1641 - RNA, 21 nt, RNAi-antisense strand
agucucugcaucagcaccuuu

SEQ ID NO: 1642 - DNA, 21 bp, Homo sapiens
gagactacacatgctcttcct

SEQ ID NO: 1643 - RNA, 21 nt, RNAi-sense strand
gacuacacaugcucuuccuuu

SEQ ID NO: 1644 - RNA, 21 nt, RNAi-antisense strand
aggaagagcauguguagucuu

SEQ ID NO: 1645 - DNA, 21 bp, Homo sapiens
gactacacatgctcttcctat

SEQ ID NO: 1646 - RNA, 21 nt, RNAi-sense strand
cuacacaugcucuuccuauuu

SEQ ID NO: 1647 - RNA, 21 nt, RNAi-antisense strand
auaggaagagcauguguaguu

SEQ ID NO: 1648 - DNA, 21 bp, Homo sapiens
gagcacttgatcacaaagcca

SEQ ID NO: 1649 - RNA, 21 nt, RNAi-sense strand
gcacuugaucacaaagccauu

SEQ ID NO: 1650 - RNA, 21 nt, RNAi-antisense strand
uggcuuugugaucaagugcuu

SEQ ID NO: 1651 - DNA, 21 bp, Homo sapiens
gatcacaaagccagtgctagg

SEQ ID NO: 1652 - RNA, 21 nt, RNAi-sense strand
ucacaaagccagugcuagguu

SEQ ID NO: 1653 - RNA, 21 nt, RNAi-antisense strand
ccuagcacuggcuuugugauu

SEQ ID NO: 1654 - DNA, 21 bp, Homo sapiens
gacgaggactttaagcagtat

SEQ ID NO: 1655 - RNA, 21 nt, RNAi-sense strand
cgaggacuuuaagcaguauuu

SEQ ID NO: 1656 - RNA, 21 nt, RNAi-antisense strand
auacugcuuaaaguccucguu

SEQ ID NO: 1657 - DNA, 21 bp, Homo sapiens
gaggactttaagcagtatgtc

SEQ ID NO: 1658 - RNA, 21 nt, RNAi-sense strand
ggacuuuaagcaguaugucuu

SEQ ID NO: 1659 - RNA, 21 nt, RNAi-antisense strand
gacauacugcuuaaaguccuu

SEQ ID NO: 1660 - DNA, 21 bp, Homo sapiens
gactttaagcagtatgtcaac

SEQ ID NO: 1661 - RNA, 21 nt, RNAi-sense strand
cuuuaagcaguaugucaacuu

SEQ ID NO: 1662 - RNA, 21 nt, RNAi-antisense strand
guugacauacugcuuaaaguu

SEQ ID NO: 1663 - DNA, 21 bp, Homo sapiens
gaacagtaagcatgaagagct

SEQ ID NO: 1664 - RNA, 21 nt, RNAi-sense strand
acaguaagcaugaagagcuuu

SEQ ID NO: 1665 - RNA, 21 nt, RNAi-antisense strand
agcucuucaugcuuacuguuu

SEQ ID NO: 1666 - DNA, 21 bp, Homo sapiens
gagatattatacaactccaga

SEQ ID NO: 1667 - RNA, 21 nt, RNAi-sense strand
gauauuauacaacuccagauu

SEQ ID NO: 1668 - RNA, 21 nt, RNAi-antisense strand
ucuggaguuguauaauaucuu

SEQ ID NO: 1669 - DNA, 21 bp, Homo sapiens
gatattatacaactccagaga

SEQ ID NO: 1670 - RNA, 21 nt, RNAi-sense strand
uauuauacaacuccagagauu

SEQ ID NO: 1671 - RNA, 21 nt, RNAi-antisense strand
ucucuggaguuguauaauauu

SEQ ID NO: 1672 - DNA, 21 bp, Homo sapiens
gagaagaggattcttcatatg

SEQ ID NO: 1673 - RNA, 21 nt, RNAi-sense strand
gaagaggauucuucauauguu

SEQ ID NO: 1674 - RNA, 21 nt, RNAi-antisense strand
cauaugaagaauccucuucuu

SEQ ID NO: 1675 - DNA, 21 bp, Homo sapiens
gaagaggattcttcatatgtg

SEQ ID NO: 1676 - RNA, 21 nt, RNAi-sense strand
agaggauucuucauauguguu

SEQ ID NO: 1677 - RNA, 21 nt, RNAi-antisense strand
cacauaugaagaauccucuuu

SEQ ID NO: 1678 - DNA, 21 bp, Homo sapiens
gaggattcttcatatgtgatc

SEQ ID NO: 1679 - RNA, 21 nt, RNAi-sense strand
ggauucuucauaugugaucuu

SEQ ID NO: 1680 - RNA, 21 nt, RNAi-antisense strand
gaucacauaugaagaauccuu

SEQ ID NO: 1681 - DNA, 21 bp, Homo sapiens
gattcttcatatgtgatcaac

SEQ ID NO: 1682 - RNA, 21 nt, RNAi-sense strand
uucuucauaugugaucaacuu

SEQ ID NO: 1683 - RNA, 21 nt, RNAi-antisense strand
guugaucacauaugaagaauu

SEQ ID NO: 1684 - DNA, 21 bp, Homo sapiens
gatcaaccttatgaacctgtt

SEQ ID NO: 1685 - RNA, 21 nt, RNAi-sense strand
ucaaccuuaugaaccuguuuu

SEQ ID NO: 1686 - RNA, 21 nt, RNAi-antisense strand
aacagguucauaagguugauu

SEQ ID NO: 1687 - DNA, 21 bp, Homo sapiens
gaccaaagtagaagccacaaa

SEQ ID NO: 1688 - RNA, 21 nt, RNAi-sense strand
ccaaaguagaagccacaaauu

SEQ ID NO: 1689 - RNA, 21 nt, RNAi-antisense strand
uuuguggcuucuacuuugguu

SEQ ID NO: 1690 - DNA, 21 bp, Homo sapiens
gaaagaccaacaccttctctg

SEQ ID NO: 1691 - RNA, 21 nt, RNAi-sense strand
aagaccaacaccuucucuguu

SEQ ID NO: 1692 - RNA, 21 nt, RNAi-antisense strand
cagagaagguguuggucuuuu

SEQ ID NO: 1693 - DNA, 21 bp, Homo sapiens
gaccaacaccttctctgaata

SEQ ID NO: 1694 - RNA, 21 nt, RNAi-sense strand
ccaacaccuucucugaauauu

SEQ ID NO: 1695 - RNA, 21 nt, RNAi-antisense strand
uauucagagaagguguugguu

SEQ ID NO: 1696 - DNA, 21 bp, Homo sapiens
gaggattccttggtcctttac

SEQ ID NO: 1697 - RNA, 21 nt, RNAi-sense strand
ggauuccuugguccuuuacuu

SEQ ID NO: 1698 - RNA, 21 nt, RNAi-antisense strand
guaaaggaccaaggaauccuu

SEQ ID NO: 1699 - DNA, 21 bp, Homo sapiens
gattccttggtcctttacaat

SEQ ID NO: 1700 - RNA, 21 nt, RNAi-sense strand
uuccuugguccuuuacaauuu

SEQ ID NO: 1701 - RNA, 21 nt, RNAi-antisense strand
auuguaaaggaccaaggaauu

SEQ ID NO: 1702 - DNA, 21 bp, Homo sapiens
gagtggctgttcaaggagatg

SEQ ID NO: 1703 - RNA, 21 nt, RNAi-sense strand
guggcuguucaaggagauguu

SEQ ID NO: 1704 - RNA, 21 nt, RNAi-antisense strand
caucuccuugaacagccacuu

SEQ ID NO: 1705 - DNA, 21 bp, Homo sapiens
gagatgtggttcgtgaattaa

SEQ ID NO: 1706 - RNA, 21 nt, RNAi-sense strand
gaugugguucgugaauuaauu

SEQ ID NO: 1707 - RNA, 21 nt, RNAi-antisense strand
uuaauucacgaaccacaucuu

SEQ ID NO: 1708 - DNA, 21 bp, Homo sapiens
gaaagcaccaaaggaagatgt

SEQ ID NO: 1709 - RNA, 21 nt, RNAi-sense strand
aagcaccaaaggaagauguuu

SEQ ID NO: 1710 - RNA, 21 nt, RNAi-antisense strand
acaucuuccuuuggugcuuuu

SEQ ID NO: 1711 - DNA, 21 bp, Homo sapiens
gaagatgtagatgcagctgta

SEQ ID NO: 1712 - RNA, 21 nt, RNAi-sense strand
agauguagaugcagcuguauu

SEQ ID NO: 1713 - RNA, 21 nt, RNAi-antisense strand
uacagcugcaucuacaucuuu

SEQ ID NO: 1714 - DNA, 21 bp, Homo sapiens
gaaagctgaatataaggagaa

SEQ ID NO: 1715 - RNA, 21 nt, RNAi-sense strand
aagcugaauauaaggagaauu

SEQ ID NO: 1716 - RNA, 21 nt, RNAi-antisense strand
uucuccuuauauucagcuuuu

SEQ ID NO: 1717 - DNA, 21 bp, Homo sapiens
gaagctgtagaatgcttactg

SEQ ID NO: 1718 - RNA, 21 nt, RNAi-sense strand
agcuguagaaugcuuacuguu

SEQ ID NO: 1719 - RNA, 21 nt, RNAi-antisense strand
caguaagcauucuacagcuuu

SEQ ID NO: 1720 - DNA, 21 bp, Homo sapiens
gaaggagtacatacctggtca

SEQ ID NO: 1721 - RNA, 21 nt, RNAi-sense strand
aggaguacauaccuggucauu

SEQ ID NO: 1722 - RNA, 21 nt, RNAi-antisense strand
ugaccagguauguacuccuuu

SEQ ID NO: 1723 - DNA, 21 bp, Homo sapiens
gaaattctgaacctgctggtt

SEQ ID NO: 1724 - RNA, 21 nt, RNAi-sense strand
aauucugaaccugcugguuuu

SEQ ID NO: 1725 - RNA, 21 nt, RNAi-antisense strand
aaccagcagguucagaauuuu

SEQ ID NO: 1726 - DNA, 21 bp, Homo sapiens
gaacctgctggtttagaaaca

SEQ ID NO: 1727 - RNA, 21 nt, RNAi-sense strand
accugcugguuuagaaacauu

SEQ ID NO: 1728 - RNA, 21 nt, RNAi-antisense strand
uguuucuaaaccagcagguuu

SEQ ID NO: 1729 - DNA, 21 bp, Homo sapiens
gaaacaccagaagcgaaagta

SEQ ID NO: 1730 - RNA, 21 nt, RNAi-sense strand
aacaccagaagcgaaaguauu

SEQ ID NO: 1731 - RNA, 21 nt, RNAi-antisense strand
uacuuucgcuucugguguuuu

SEQ ID NO: 1732 - DNA, 21 bp, Homo sapiens
gaagtagttcggaaacttaaa

SEQ ID NO: 1733 - RNA, 21 nt, RNAi-sense strand
aguaguucggaaacuuaaauu

SEQ ID NO: 1734 - RNA, 21 nt, RNAi-antisense strand
uuuaaguuuccgaacuacuuu

SEQ ID NO: 1735 - DNA, 21 bp, Homo sapiens
gatcaagtagatatagctgtt

SEQ ID NO: 1736 - RNA, 21 nt, RNAi-sense strand
ucaaguagauauagcuguuuu

SEQ ID NO: 1737 - RNA, 21 nt, RNAi-antisense strand
aacagcuauaucuacuugauu

SEQ ID NO: 1738 - DNA, 21 bp, Homo sapiens
gatatagctgttcaagaactc

SEQ ID NO: 1739 - RNA, 21 nt, RNAi-sense strand
uauagcuguucaagaacucuu

SEQ ID NO: 1740 - RNA, 21 nt, RNAi-antisense strand
gaguucuugaacagcuauauu

SEQ ID NO: 1741 - DNA, 21 bp, Homo sapiens
gaactccttcagctaaaggca

SEQ ID NO: 1742 - RNA, 21 nt, RNAi-sense strand
acuccuucagcuaaaggcauu

SEQ ID NO: 1743 - RNA, 21 nt, RNAi-antisense strand
ugccuuuagcugaaggaguuu

SEQ ID NO: 1744 - DNA, 21 bp, Homo sapiens
gataggagtagagtataagcc

SEQ ID NO: 1745 - RNA, 21 nt, RNAi-sense strand
uaggaguagaguauaagccuu

SEQ ID NO: 1746 - RNA, 21 nt, RNAi-antisense strand
ggcuuauacucuacuccuauu

SEQ ID NO: 1747 - DNA, 21 bp, Homo sapiens
gagtagagtataagcctgtgt

SEQ ID NO: 1748 - RNA, 21 nt, RNAi-sense strand
guagaguauaagccuguguuu

SEQ ID NO: 1749 - RNA, 21 nt, RNAi-antisense strand
acacaggcuuauacucuacuu

SEQ ID NO: 1750 - DNA, 21 bp, Homo sapiens
gagtataagcctgtgtcggcc

SEQ ID NO: 1751 - RNA, 21 nt, RNAi-sense strand
guauaagccugugucggccuu

SEQ ID NO: 1752 - RNA, 21 nt, RNAi-antisense strand
ggccgacacaggcuuauacuu

SEQ ID NO: 1753 - DNA, 21 bp, Homo sapiens
gagctgaggacaaagataaga

SEQ ID NO: 1754 - RNA, 21 nt, RNAi-sense strand
gcugaggacaaagauaagauu

SEQ ID NO: 1755 - RNA, 21 nt, RNAi-antisense strand
ucuuaucuuuguccucagcuu

SEQ ID NO: 1756 - DNA, 21 bp, Homo sapiens
gaggacaaagataagaagaag

SEQ ID NO: 1757 - RNA, 21 nt, RNAi-sense strand
ggacaaagauaagaagaaguu

SEQ ID NO: 1758 - RNA, 21 nt, RNAi-antisense strand
cuucuucuuaucuuuguccuu

SEQ ID NO: 1759 - DNA, 21 bp, Homo sapiens
gattggtattctcaggtcatc

SEQ ID NO: 1760 - RNA, 21 nt, RNAi-sense strand
uugguauucucaggucaucuu

SEQ ID NO: 1761 - RNA, 21 nt, RNAi-antisense strand
gaugaccugagaauaccaauu

SEQ ID NO: 1762 - DNA, 21 bp, Homo sapiens
gaaatgattgaataccatgac

SEQ ID NO: 1763 - RNA, 21 nt, RNAi-sense strand
aaugauugaauaccaugacuu

SEQ ID NO: 1764 - RNA, 21 nt, RNAi-antisense strand
gucaugguauucaaucauuuu

SEQ ID NO: 1765 - DNA, 21 bp, Homo sapiens
gattgaataccatgacataag

SEQ ID NO: 1766 - RNA, 21 nt, RNAi-sense strand
uugaauaccaugacauaaguu

SEQ ID NO: 1767 - RNA, 21 nt, RNAi-antisense strand
cuuaugucaugguauucaauu

SEQ ID NO: 1768 - DNA, 21 bp, Homo sapiens
gaataccatgacataagtggc

SEQ ID NO: 1769 - RNA, 21 nt, RNAi-sense strand
auaccaugacauaaguggcuu

SEQ ID NO: 1770 - RNA, 21 nt, RNAi-antisense strand
gccacuuaugucaugguauuu

SEQ ID NO: 1771 - DNA, 21 bp, Homo sapiens
gacataagtggctgttatatt

SEQ ID NO: 1772 - RNA, 21 nt, RNAi-sense strand
cauaaguggcuguuauauuuu

SEQ ID NO: 1773 - RNA, 21 nt, RNAi-antisense strand
aauauaacagccacuuauguu

SEQ ID NO: 1774 - DNA, 21 bp, Homo sapiens
gatgctgagatcaagaaactt

SEQ ID NO: 1775 - RNA, 21 nt, RNAi-sense strand
ugcugagaucaagaaacuuuu

SEQ ID NO: 1776 - RNA, 21 nt, RNAi-antisense strand
aaguuucuugaucucagcauu

SEQ ID NO: 1777 - DNA, 21 bp, Homo sapiens
gagatcaagaaacttggtgtt

SEQ ID NO: 1778 - RNA, 21 nt, RNAi-sense strand
gaucaagaaacuugguguuuu

SEQ ID NO: 1779 - RNA, 21 nt, RNAi-antisense strand
aacaccaaguuucuugaucuu

SEQ ID NO: 1780 - DNA, 21 bp, Homo sapiens
gatcaagaaacttggtgttga

SEQ ID NO: 1781 - RNA, 21 nt, RNAi-sense strand
ucaagaaacuugguguugauu

SEQ ID NO: 1782 - RNA, 21 nt, RNAi-antisense strand
ucaacaccaaguuucuugauu

SEQ ID NO: 1783 - DNA, 21 bp, Homo sapiens
gagaaagagaagactcatgtt

SEQ ID NO: 1784 - RNA, 21 nt, RNAi-sense strand
gaaagagaagacucauguuuu

SEQ ID NO: 1785 - RNA, 21 nt, RNAi-antisense strand
aacaugagucuucucuuucuu

SEQ ID NO: 1786 - DNA, 21 bp, Homo sapiens
gaaagagaagactcatgttgc

SEQ ID NO: 1787 - RNA, 21 nt, RNAi-sense strand
aagagaagacucauguugcuu

SEQ ID NO: 1788 - RNA, 21 nt, RNAi-antisense strand
gcaacaugagucuucucuuuu

SEQ ID NO: 1789 - DNA, 21 bp, Homo sapiens
gagaagactcatgttgctgac

SEQ ID NO: 1790 - RNA, 21 nt, RNAi-sense strand
gaagacucauguugcugacuu

SEQ ID NO: 1791 - RNA, 21 nt, RNAi-antisense strand
gucagcaacaugagucuucuu

SEQ ID NO: 1792 - DNA, 21 bp, Homo sapiens
gaagactcatgttgctgactt

SEQ ID NO: 1793 - RNA, 21 nt, RNAi-sense strand
agacucauguugcugacuuuu

SEQ ID NO: 1794 - RNA, 21 nt, RNAi-antisense strand
aagucagcaacaugagucuuu

SEQ ID NO: 1795 - DNA, 21 bp, Homo sapiens
gactcatgttgctgactttgc

SEQ ID NO: 1796 - RNA, 21 nt, RNAi-sense strand
cucauguugcugacuuugcuu

SEQ ID NO: 1797 - RNA, 21 nt, RNAi-antisense strand
gcaaagucagcaacaugaguu

SEQ ID NO: 1798 - DNA, 21 bp, Homo sapiens
gagctggcagaaccaattgcc

SEQ ID NO: 1799 - RNA, 21 nt, RNAi-sense strand
gcuggcagaaccaauugccuu

SEQ ID NO: 1800 - RNA, 21 nt, RNAi-antisense strand
ggcaauugguucugccagcuu

SEQ ID NO: 1801 - DNA, 21 bp, Homo sapiens
gaaccaattgccattcgtcct

SEQ ID NO: 1802 - RNA, 21 nt, RNAi-sense strand
accaauugccauucguccuuu

SEQ ID NO: 1803 - RNA, 21 nt, RNAi-antisense strand
aggacgaauggcaauugguuu

SEQ ID NO: 1804 - DNA, 21 bp, Homo sapiens
gaaacagtaatgtatcctgca

SEQ ID NO: 1805 - RNA, 21 nt, RNAi-sense strand
aacaguaauguauccugcauu

SEQ ID NO: 1806 - RNA, 21 nt, RNAi-antisense strand
ugcaggauacauuacuguuuu

SEQ ID NO: 1807 - DNA, 21 bp, Homo sapiens
gaattcaagcatcctcagcct

SEQ ID NO: 1808 - RNA, 21 nt, RNAi-sense strand
auucaagcauccucagccuuu

SEQ ID NO: 1809 - RNA, 21 nt, RNAi-antisense strand
aggcugaggaugcuugaauuu

SEQ ID NO: 1810 - DNA, 21 bp, Homo sapiens
gaagaggcagcggaagaggtc

SEQ ID NO: 1811 - RNA, 21 nt, RNAi-sense strand
agaggcagcggaagaggucuu

SEQ ID NO: 1812 - RNA, 21 nt, RNAi-antisense strand
gaccucuuccgcugccucuuu

SEQ ID NO: 1813 - DNA, 21 bp, Homo sapiens
gaggcagcggaagaggtcttg

SEQ ID NO: 1814 - RNA, 21 nt, RNAi-sense strand
ggcagcggaagaggucuuguu

SEQ ID NO: 1815 - RNA, 21 nt, RNAi-antisense strand
caagaccucuuccgcugccuu

SEQ ID NO: 1816 - DNA, 21 bp, Homo sapiens
gaagaggtcttgcagatactt

SEQ ID NO: 1817 - RNA, 21 nt, RNAi-sense strand
agaggucuugcagauacuuuu

SEQ ID NO: 1818 - RNA, 21 nt, RNAi-antisense strand
aaguaucugcaagaccucuuu

SEQ ID NO: 1819 - DNA, 21 bp, Homo sapiens
gaggtcttgcagatacttgac

SEQ ID NO: 1820 - RNA, 21 nt, RNAi-sense strand
ggucuugcagauacuugacuu

SEQ ID NO: 1821 - RNA, 21 nt, RNAi-antisense strand
gucaaguaucugcaagaccuu

SEQ ID NO: 1822 - DNA, 21 bp, Homo sapiens
gatacttgacttatatgctca

SEQ ID NO: 1823 - RNA, 21 nt, RNAi-sense strand
uacuugacuuauaugcucauu

SEQ ID NO: 1824 - RNA, 21 nt, RNAi-antisense strand
ugagcauauaagucaaguauu

SEQ ID NO: 1825 - DNA, 21 bp, Homo sapiens
gacttatatgctcaggtatat

SEQ ID NO: 1826 - RNA, 21 nt, RNAi-sense strand
cuuauaugcucagguauauuu

SEQ ID NO: 1827 - RNA, 21 nt, RNAi-antisense strand
auauaccugagcauauaaguu

SEQ ID NO: 1828 - DNA, 21 bp, Homo sapiens
gaagaactcctggcaattcct

SEQ ID NO: 1829 - RNA, 21 nt, RNAi-sense strand
agaacuccuggcaauuccuuu

SEQ ID NO: 1830 - RNA, 21 nt, RNAi-antisense strand
aggaauugccaggaguucuuu

SEQ ID NO: 1831 - DNA, 21 bp, Homo sapiens
gaactcctggcaattcctgtt

SEQ ID NO: 1832 - RNA, 21 nt, RNAi-sense strand
acuccuggcaauuccuguuuu

SEQ ID NO: 1833 - RNA, 21 nt, RNAi-antisense strand
aacaggaauugccaggaguuu

SEQ ID NO: 1834 - DNA, 21 bp, Homo sapiens
gaggagactatacaactacaa

SEQ ID NO: 1835 - RNA, 21 nt, RNAi-sense strand
ggagacuauacaacuacaauu

SEQ ID NO: 1836 - RNA, 21 nt, RNAi-antisense strand
uuguaguuguauagucuccuu

SEQ ID NO: 1837 - DNA, 21 bp, Homo sapiens
gagactatacaactacaatag

SEQ ID NO: 1838 - RNA, 21 nt, RNAi-sense strand
gacuauacaacuacaauaguu

SEQ ID NO: 1839 - RNA, 21 nt, RNAi-antisense strand
cuauuguaguuguauagucuu

SEQ ID NO: 1840 - DNA, 21 bp, Homo sapiens
gaagcatttatatctgctagt

SEQ ID NO: 1841 - RNA, 21 nt, RNAi-sense strand
agcauuuauaucugcuaguuu

SEQ ID NO: 1842 - RNA, 21 nt, RNAi-antisense strand
acuagcagauauaaaugcuuu

SEQ ID NO: 1843 - DNA, 21 bp, Homo sapiens
gaggaacatcacatcatttag

SEQ ID NO: 1844 - RNA, 21 nt, RNAi-sense strand
ggaacaucacaucauuuaguu

SEQ ID NO: 1845 - RNA, 21 nt, RNAi-antisense strand
cuaaaugaugugauguuccuu

SEQ ID NO: 1846 - DNA, 21 bp, Homo sapiens
gaagatccaaagataccagga

SEQ ID NO: 1847 - RNA, 21 nt, RNAi-sense strand
agauccaaagauaccaggauu

SEQ ID NO: 1848 - RNA, 21 nt, RNAi-antisense strand
uccugguaucuuuggaucuuu

SEQ ID NO: 1849 - DNA, 21 bp, Homo sapiens
gatccaaagataccaggagag

SEQ ID NO: 1850 - RNA, 21 nt, RNAi-sense strand
uccaaagauaccaggagaguu

SEQ ID NO: 1851 - RNA, 21 nt, RNAi-antisense strand
cucuccugguaucuuuggauu

SEQ ID NO: 1852 - DNA, 21 bp, Homo sapiens
gataccaggagagaagcaatt

SEQ ID NO: 1853 - RNA, 21 nt, RNAi-sense strand
uaccaggagagaagcaauuuu

SEQ ID NO: 1854 - RNA, 21 nt, RNAi-antisense strand
aauugcuucucuccugguauu

SEQ ID NO: 1855 - DNA, 21 bp, Homo sapiens
gagagaagcaatttgcctatc

SEQ ID NO: 1856 - RNA, 21 nt, RNAi-sense strand
gagaagcaauuugccuaucuu

SEQ ID NO: 1857 - RNA, 21 nt, RNAi-antisense strand
gauaggcaaauugcuucucuu

SEQ ID NO: 1858 - DNA, 21 bp, Homo sapiens
gagaagcaatttgcctatcaa

SEQ ID NO: 1859 - RNA, 21 nt, RNAi-sense strand
gaagcaauuugccuaucaauu

SEQ ID NO: 1860 - RNA, 21 nt, RNAi-antisense strand
uugauaggcaaauugcuucuu

SEQ ID NO: 1861 - DNA, 21 bp, Homo sapiens
gacaactcgaactattggtgt

SEQ ID NO: 1862 - RNA, 21 nt, RNAi-sense strand
caacucgaacuauugguguuu

SEQ ID NO: 1863 - RNA, 21 nt, RNAi-antisense strand
acaccaauaguucgaguuguu

SEQ ID NO: 1864 - DNA, 21 bp, Homo sapiens
gaactattggtgttatgacca

SEQ ID NO: 1865 - RNA, 21 nt, RNAi-sense strand
acuauugguguuaugaccauu

SEQ ID NO: 1866 - RNA, 21 nt, RNAi-antisense strand
uggucauaacaccaauaguuu

SEQ ID NO: 1867 - DNA, 21 bp, Homo sapiens
gattattccttgtggcattac

SEQ ID NO: 1868 - RNA, 21 nt, RNAi-sense strand
uuauuccuuguggcauuacuu

SEQ ID NO: 1869 - RNA, 21 nt, RNAi-antisense strand
guaaugccacaaggaauaauu

SEQ ID NO: 1870 - DNA, 21 bp, Homo sapiens
gaagaagacaaagaagcgctg

SEQ ID NO: 1871 - RNA, 21 nt, RNAi-sense strand
agaagacaaagaagcgcuguu

SEQ ID NO: 1872 - RNA, 21 nt, RNAi-antisense strand
cagcgcuucuuugucuucuuu

SEQ ID NO: 1873 - DNA, 21 bp, Homo sapiens
gaagacaaagaagcgctgatt

SEQ ID NO: 1874 - RNA, 21 nt, RNAi-sense strand
agacaaagaagcgcugauuuu

SEQ ID NO: 1875 - RNA, 21 nt, RNAi-antisense strand
aaucagcgcuucuuugucuuu

SEQ ID NO: 1876 - DNA, 21 bp, Homo sapiens
gacaaagaagcgctgattgca

SEQ ID NO: 1877 - RNA, 21 nt, RNAi-sense strand
caaagaagcgcugauugcauu

SEQ ID NO: 1878 - RNA, 21 nt, RNAi-antisense strand
ugcaaucagcgcuucuuuguu

SEQ ID NO: 1879 - DNA, 21 bp, Homo sapiens
gattatcgaaggcgattactc

SEQ ID NO: 1880 - RNA, 21 nt, RNAi-sense strand
uuaucgaaggcgauuacucuu

SEQ ID NO: 1881 - RNA, 21 nt, RNAi-antisense strand
gaguaaucgccuucgauaauu

SEQ ID NO: 1882 - DNA, 21 bp, Homo sapiens
gaaggcgattactcagtgtta

SEQ ID NO: 1883 - RNA, 21 nt, RNAi-sense strand
aggcgauuacucaguguuauu

SEQ ID NO: 1884 - RNA, 21 nt, RNAi-antisense strand
uaacacugaguaaucgccuuu

SEQ ID NO: 1885 - DNA, 21 bp, Homo sapiens
gattactcagtgttaacatcc

SEQ ID NO: 1886 - RNA, 21 nt, RNAi-sense strand
uuacucaguguuaacauccuu

SEQ ID NO: 1887 - RNA, 21 nt, RNAi-antisense strand
ggauguuaacacugaguaauu

SEQ ID NO: 1888 - DNA, 21 bp, Homo sapiens
gagctgatttacgagataatt

SEQ ID NO: 1889 - RNA, 21 nt, RNAi-sense strand
gcugauuuacgagauaauuuu

SEQ ID NO: 1890 - RNA, 21 nt, RNAi-antisense strand
aauuaucucguaaaucagcuu

SEQ ID NO: 1891 - DNA, 21 bp, Homo sapiens
gagataattattctccaggtt

SEQ ID NO: 1892 - RNA, 21 nt, RNAi-sense strand
gauaauuauucuccagguuuu

SEQ ID NO: 1893 - RNA, 21 nt, RNAi-antisense strand
aaccuggagaauaauuaucuu

SEQ ID NO: 1894 - DNA, 21 bp, Homo sapiens
gataattattctccaggttgg

SEQ ID NO: 1895 - RNA, 21 nt, RNAi-sense strand
uaauuauucuccagguugguu

SEQ ID NO: 1896 - RNA, 21 nt, RNAi-antisense strand
ccaaccuggagaauaauuauu

SEQ ID NO: 1897 - DNA, 21 bp, Homo sapiens
gatatgaagagctgtcagttt

SEQ ID NO: 1898 - RNA, 21 nt, RNAi-sense strand
uaugaagagcugucaguuuuu

SEQ ID NO: 1899 - RNA, 21 nt, RNAi-antisense strand
aaacugacagcucuucauauu

SEQ ID NO: 1900 - DNA, 21 bp, Homo sapiens
gaagagctgtcagtttgtagc

SEQ ID NO: 1901 - RNA, 21 nt, RNAi-sense strand
agagcugucaguuuguagcuu

SEQ ID NO: 1902 - RNA, 21 nt, RNAi-antisense strand
gcuacaaacugacagcucuuu

SEQ ID NO: 1903 - DNA, 21 bp, Homo sapiens
gagctgtcagtttgtagccgt

SEQ ID NO: 1904 - RNA, 21 nt, RNAi-sense strand
gcugucaguuuguagccguuu

SEQ ID NO: 1905 - RNA, 21 nt, RNAi-antisense strand
acggcuacaaacugacagcuu

SEQ ID NO: 1906 - DNA, 21 bp, Homo sapiens
gaggcagagactaaacttcaa

SEQ ID NO: 1907 - RNA, 21 nt, RNAi-sense strand
ggcagagacuaaacuucaauu

SEQ ID NO: 1908 - RNA, 21 nt, RNAi-antisense strand
uugaaguuuagucucugccuu

SEQ ID NO: 1909 - DNA, 21 bp, Homo sapiens
gagactaaacttcaagctatt

SEQ ID NO: 1910 - RNA, 21 nt, RNAi-sense strand
gacuaaacuucaagcuauuuu

SEQ ID NO: 1911 - RNA, 21 nt, RNAi-antisense strand
aauagcuugaaguuuagucuu

SEQ ID NO: 1912 - DNA, 21 bp, Homo sapiens
gaagaccttaagactcatatg

SEQ ID NO: 1913 - RNA, 21 nt, RNAi-sense strand
agaccuuaagacucauauguu

SEQ ID NO: 1914 - RNA, 21 nt, RNAi-antisense strand
cauaugagucuuaaggucuuu

SEQ ID NO: 1915 - DNA, 21 bp, Homo sapiens
gaccttaagactcatatggtt

SEQ ID NO: 1916 - RNA, 21 nt, RNAi-sense strand
ccuuaagacucauaugguuuu

SEQ ID NO: 1917 - RNA, 21 nt, RNAi-antisense strand
aaccauaugagucuuaagguu

SEQ ID NO: 1918 - DNA, 21 bp, Homo sapiens
gactcatatggttgtggctaa

SEQ ID NO: 1919 - RNA, 21 nt, RNAi-sense strand
cucauaugguuguggcuaauu

SEQ ID NO: 1920 - RNA, 21 nt, RNAi-antisense strand
uuagccacaaccauaugaguu

SEQ ID NO: 1921 - DNA, 21 bp, Homo sapiens
gaagactttcagaagatacta

SEQ ID NO: 1922 - RNA, 21 nt, RNAi-sense strand
agacuuucagaagauacuauu

SEQ ID NO: 1923 - RNA, 21 nt, RNAi-antisense strand
uaguaucuucugaaagucuuu

SEQ ID NO: 1924 - DNA, 21 bp, Homo sapiens
gactttcagaagatactagat

SEQ ID NO: 1925 - RNA, 21 nt, RNAi-sense strand
cuuucagaagauacuagauuu

SEQ ID NO: 1926 - RNA, 21 nt, RNAi-antisense strand
aucuaguaucuucugaaaguu

SEQ ID NO: 1927 - DNA, 21 bp, Homo sapiens
gaagatactagattctggaaa

SEQ ID NO: 1928 - RNA, 21 nt, RNAi-sense strand
agauacuagauucuggaaauu

SEQ ID NO: 1929 - RNA, 21 nt, RNAi-antisense strand
uuuccagaaucuaguaucuuu

SEQ ID NO: 1930 - DNA, 21 bp, Homo sapiens
gatactagattctggaaagat

SEQ ID NO: 1931 - RNA, 21 nt, RNAi-sense strand
uacuagauucuggaaagauuu

SEQ ID NO: 1932 - RNA, 21 nt, RNAi-antisense strand
aucuuuccagaaucuaguauu

SEQ ID NO: 1933 - DNA, 21 bp, Homo sapiens
gattctggaaagattgttcag

SEQ ID NO: 1934 - RNA, 21 nt, RNAi-sense strand
uucuggaaagauuguucaguu

SEQ ID NO: 1935 - RNA, 21 nt, RNAi-antisense strand
cugaacaaucuuuccagaauu

SEQ ID NO: 1936 - DNA, 21 bp, Homo sapiens
gaaagattgttcagattccat

SEQ ID NO: 1937 - RNA, 21 nt, RNAi-sense strand
aagauuguucagauuccauuu

SEQ ID NO: 1938 - RNA, 21 nt, RNAi-antisense strand
auggaaucugaacaaucuuuu

SEQ ID NO: 1939 - DNA, 21 bp, Homo sapiens
gattgttcagattccattctg

SEQ ID NO: 1940 - RNA, 21 nt, RNAi-sense strand
uuguucagauuccauucuguu

SEQ ID NO: 1941 - RNA, 21 nt, RNAi-antisense strand
cagaauggaaucugaacaauu

SEQ ID NO: 1942 - DNA, 21 bp, Homo sapiens
gaaattgactgtgaggactgg

SEQ ID NO: 1943 - RNA, 21 nt, RNAi-sense strand
aauugacugugaggacugguu

SEQ ID NO: 1944 - RNA, 21 nt, RNAi-antisense strand
ccaguccucacagucaauuuu

SEQ ID NO: 1945 - DNA, 21 bp, Homo sapiens
gactgtgaggactggatcaaa

SEQ ID NO: 1946 - RNA, 21 nt, RNAi-sense strand
cugugaggacuggaucaaauu

SEQ ID NO: 1947 - RNA, 21 nt, RNAi-antisense strand
uuugauccaguccucacaguu

SEQ ID NO: 1948 - DNA, 21 bp, Homo sapiens
gatcaagatcttgaacctggt

SEQ ID NO: 1949 - RNA, 21 nt, RNAi-sense strand
ucaagaucuugaaccugguuu

SEQ ID NO: 1950 - RNA, 21 nt, RNAi-antisense strand
accagguucaagaucuugauu

SEQ ID NO: 1951 - DNA, 21 bp, Homo sapiens
gatcttgaacctggtgctcca

SEQ ID NO: 1952 - RNA, 21 nt, RNAi-sense strand
ucuugaaccuggugcuccauu

SEQ ID NO: 1953 - RNA, 21 nt, RNAi-antisense strand
uggagcaccagguucaagauu

SEQ ID NO: 1954 - DNA, 21 bp, Homo sapiens
gaacctggtgctccatccatg

SEQ ID NO: 1955 - RNA, 21 nt, RNAi-sense strand
accuggugcuccauccauguu

SEQ ID NO: 1956 - RNA, 21 nt, RNAi-antisense strand
cauggauggagcaccagguuu

SEQ ID NO: 1957 - DNA, 21 bp, Homo sapiens
gaactgcagcctggagccaaa

SEQ ID NO: 1958 - RNA, 21 nt, RNAi-sense strand
acugcagccuggagccaaauu

SEQ ID NO: 1959 - RNA, 21 nt, RNAi-antisense strand
uuuggcuccaggcugcaguuu

SEQ ID NO: 1960 - DNA, 21 bp, Homo sapiens
gagccaaatgtgtctgtggca

SEQ ID NO: 1961 - RNA, 21 nt, RNAi-sense strand
gccaaaugugucuguggcauu

SEQ ID NO: 1962 - RNA, 21 nt, RNAi-antisense strand
ugccacagacacauuuggcuu

SEQ ID NO: 1963 - DNA, 21 bp, Homo sapiens
gaagtcacacaggacaattat

SEQ ID NO: 1964 - RNA, 21 nt, RNAi-sense strand
agucacacaggacaauuauuu

SEQ ID NO: 1965 - RNA, 21 nt, RNAi-antisense strand
auaauuguccugugugacuuu

SEQ ID NO: 1966 - DNA, 21 bp, Homo sapiens
tatacttcgctacttggctag

SEQ ID NO: 1967 - RNA, 21 nt, RNAi-sense strand
uacuucgcuacuuggcuaguu

SEQ ID NO: 1968 - RNA, 21 nt, RNAi-antisense strand
cuagccaaguagcgaaguauu

SEQ ID NO: 1969 - DNA, 21 bp, Homo sapiens
tacttcgctacttggctagag

SEQ ID NO: 1970 - RNA, 21 nt, RNAi-sense strand
cuucgcuacuuggcuagaguu

SEQ ID NO: 1971 - RNA, 21 nt, RNAi-antisense strand
cucuagccaaguagcgaaguu

SEQ ID NO: 1972 - DNA, 21 bp, Homo sapiens
tacttggctagagttgcaact

SEQ ID NO: 1973 - RNA, 21 nt, RNAi-sense strand
cuuggcuagaguugcaacuuu

SEQ ID NO: 1974 - RNA, 21 nt, RNAi-antisense strand
aguugcaacucuagccaaguu

SEQ ID NO: 1975 - DNA, 21 bp, Homo sapiens
tagagttgcaactacagctgg

SEQ ID NO: 1976 - RNA, 21 nt, RNAi-sense strand
gaguugcaacuacagcugguu

SEQ ID NO: 1977 - RNA, 21 nt, RNAi-antisense strand
ccagcuguaguugcaacucuu

SEQ ID NO: 1978 - DNA, 21 bp, Homo sapiens
tatatggctctaatctgatgg

SEQ ID NO: 1979 - RNA, 21 nt, RNAi-sense strand
uauggcucuaaucugaugguu

SEQ ID NO: 1980 - RNA, 21 nt, RNAi-antisense strand
ccaucagauuagagccauauu

SEQ ID NO: 1981 - DNA, 21 bp, Homo sapiens
tatggctctaatctgatggaa

SEQ ID NO: 1982 - RNA, 21 nt, RNAi-sense strand
uggcucuaaucugauggaauu

SEQ ID NO: 1983 - RNA, 21 nt, RNAi-antisense strand
uuccaucagauuagagccauu

SEQ ID NO: 1984 - DNA, 21 bp, Homo sapiens
taatctgatggaacatactga

SEQ ID NO: 1985 - RNA, 21 nt, RNAi-sense strand
aucugauggaacauacugauu

SEQ ID NO: 1986 - RNA, 21 nt, RNAi-antisense strand
ucaguauguuccaucagauuu

SEQ ID NO: 1987 - DNA, 21 bp, Homo sapiens
tactgagattgatcactggtt

SEQ ID NO: 1988 - RNA, 21 nt, RNAi-sense strand
cugagauugaucacugguuuu

SEQ ID NO: 1989 - RNA, 21 nt, RNAi-antisense strand
aaccagugaucaaucucaguu

SEQ ID NO: 1990 - DNA, 21 bp, Homo sapiens
taatgaactcaatcattgcct

SEQ ID NO: 1991 - RNA, 21 nt, RNAi-sense strand
augaacucaaucauugccuuu

SEQ ID NO: 1992 - RNA, 21 nt, RNAi-antisense strand
aggcaaugauugaguucauuu

SEQ ID NO: 1993 - DNA, 21 bp, Homo sapiens
tacttagttggaaactccttg

SEQ ID NO: 1994 - RNA, 21 nt, RNAi-sense strand
cuuaguuggaaacuccuuguu

SEQ ID NO: 1995 - RNA, 21 nt, RNAi-antisense strand
caaggaguuuccaacuaaguu

SEQ ID NO: 1996 - DNA, 21 bp, Homo sapiens
tagttggaaactccttgagtt

SEQ ID NO: 1997 - RNA, 21 nt, RNAi-sense strand
guuggaaacuccuugaguuuu

SEQ ID NO: 1998 - RNA, 21 nt, RNAi-antisense strand
aacucaaggaguuuccaacuu

SEQ ID NO: 1999 - DNA, 21 bp, Homo sapiens
taccgtcagatttcctccaga

SEQ ID NO: 2000 - RNA, 21 nt, RNAi-sense strand
ccgucagauuuccuccagauu

SEQ ID NO: 2001 - RNA, 21 nt, RNAi-antisense strand
ucuggaggaaaucugacgguu

SEQ ID NO: 2002 - DNA, 21 bp, Homo sapiens
tatcttggaagatgttgcaat

SEQ ID NO: 2003 - RNA, 21 nt, RNAi-sense strand
ucuuggaagauguugcaauuu

SEQ ID NO: 2004 - RNA, 21 nt, RNAi-antisense strand
auugcaacaucuuccaagauu

SEQ ID NO: 2005 - DNA, 21 bp, Homo sapiens
taatgaagtatgcagagaagc

SEQ ID NO: 2006 - RNA, 21 nt, RNAi-sense strand
augaaguaugcagagaagcuu

SEQ ID NO: 2007 - RNA, 21 nt, RNAi-antisense strand
gcuucucugcauacuucauuu

SEQ ID NO: 2008 - DNA, 21 bp, Homo sapiens
tatgcagagaagctaattcaa

SEQ ID NO: 2009 - RNA, 21 nt, RNAi-sense strand
ugcagagaagcuaauucaauu

SEQ ID NO: 2010 - RNA, 21 nt, RNAi-antisense strand
uugaauuagcuucucugcauu

SEQ ID NO: 2011 - DNA, 21 bp, Homo sapiens
tatgtggatgatactcctgct

SEQ ID NO: 2012 - RNA, 21 nt, RNAi-sense strand
uguggaugauacuccugcuuu

SEQ ID NO: 2013 - RNA, 21 nt, RNAi-antisense strand
agcaggaguaucauccacauu

SEQ ID NO: 2014 - DNA, 21 bp, Homo sapiens
tactcctgctgaacagatgaa

SEQ ID NO: 2015 - RNA, 21 nt, RNAi-sense strand
cuccugcugaacagaugaauu

SEQ ID NO: 2016 - RNA, 21 nt, RNAi-antisense strand
uucaucuguucagcaggaguu

SEQ ID NO: 2017 - DNA, 21 bp, Homo sapiens
tagtaacaatggatgcatgag

SEQ ID NO: 2018 - RNA, 21 nt, RNAi-sense strand
guaacaauggaugcaugaguu

SEQ ID NO: 2019 - RNA, 21 nt, RNAi-antisense strand
cucaugcauccauuguuacuu

SEQ ID NO: 2020 - DNA, 21 bp, Homo sapiens
taacaatggatgcatgagaga

SEQ ID NO: 2021 - RNA, 21 nt, RNAi-sense strand
acaauggaugcaugagagauu

SEQ ID NO: 2022 - RNA, 21 nt, RNAi-antisense strand
ucucucaugcauccauuguuu

SEQ ID NO: 2023 - DNA, 21 bp, Homo sapiens
tagttgacagcatcgaaggtg

SEQ ID NO: 2024 - RNA, 21 nt, RNAi-sense strand
guugacagcaucgaagguguu

SEQ ID NO: 2025 - RNA, 21 nt, RNAi-antisense strand
caccuucgaugcugucaacuu

SEQ ID NO: 2026 - DNA, 21 bp, Homo sapiens
taccatgacagagatgagcag

SEQ ID NO: 2027 - RNA, 21 nt, RNAi-sense strand
ccaugacagagaugagcaguu

SEQ ID NO: 2028 - RNA, 21 nt, RNAi-antisense strand
cugcucaucucugucaugguu

SEQ ID NO: 2029 - DNA, 21 bp, Homo sapiens
tattgaagctttaggcataag

SEQ ID NO: 2030 - RNA, 21 nt, RNAi-sense strand
uugaagcuuuaggcauaaguu

SEQ ID NO: 2031 - RNA, 21 nt, RNAi-antisense strand
cuuaugccuaaagcuucaauu

SEQ ID NO: 2032 - DNA, 21 bp, Homo sapiens
tatagtcggctaaatctcaac

SEQ ID NO: 2033 - RNA, 21 nt, RNAi-sense strand
uagucggcuaaaucucaacuu

SEQ ID NO: 2034 - RNA, 21 nt, RNAi-antisense strand
guugagauuuagccgacuauu

SEQ ID NO: 2035 - DNA, 21 bp, Homo sapiens
tagtcggctaaatctcaacaa

SEQ ID NO: 2036 - RNA, 21 nt, RNAi-sense strand
gucggcuaaaucucaacaauu

SEQ ID NO: 2037 - RNA, 21 nt, RNAi-antisense strand
uuguugagauuuagccgacuu

SEQ ID NO: 2038 - DNA, 21 bp, Homo sapiens
taaatctcaacaacacagtgc

SEQ ID NO: 2039 - RNA, 21 nt, RNAi-sense strand
aaucucaacaacacagugcuu

SEQ ID NO: 2040 - RNA, 21 nt, RNAi-antisense strand
gcacuguguuguugagauuuu

SEQ ID NO: 2041 - DNA, 21 bp, Homo sapiens
tacggttcgtggtgtactgag

SEQ ID NO: 2042 - RNA, 21 nt, RNAi-sense strand
cgguucgugguguacugaguu

SEQ ID NO: 2043 - RNA, 21 nt, RNAi-antisense strand
cucaguacaccacgaaccguu

SEQ ID NO: 2044 - DNA, 21 bp, Homo sapiens
tactgaagaaagaagtgatcc

SEQ ID NO: 2045 - RNA, 21 nt, RNAi-sense strand
cugaagaaagaagugauccuu

SEQ ID NO: 2046 - RNA, 21 nt, RNAi-antisense strand
ggaucacuucuuucuucaguu

SEQ ID NO: 2047 - DNA, 21 bp, Homo sapiens
tacctgaagctcaggaggaga

SEQ ID NO: 2048 - RNA, 21 nt, RNAi-sense strand
ccugaagcucaggaggagauu

SEQ ID NO: 2049 - RNA, 21 nt, RNAi-antisense strand
ucuccuccugagcuucagguu

SEQ ID NO: 2050 - DNA, 21 bp, Homo sapiens
taaggtcacttggcttgcaga

SEQ ID NO: 2051 - RNA, 21 nt, RNAi-sense strand
aggucacuuggcuugcagauu

SEQ ID NO: 2052 - RNA, 21 nt, RNAi-antisense strand
ucugcaagccaagugaccuuu

SEQ ID NO: 2053 - DNA, 21 bp, Homo sapiens
tacacatgctcttcctattcc

SEQ ID NO: 2054 - RNA, 21 nt, RNAi-sense strand
cacaugcucuuccuauuccuu

SEQ ID NO: 2055 - RNA, 21 nt, RNAi-antisense strand
ggaauaggaagagcauguguu

SEQ ID NO: 2056 - DNA, 21 bp, Homo sapiens
tattccagtaatctgtgtcac

SEQ ID NO: 2057 - RNA, 21 nt, RNAi-sense strand
uuccaguaaucugugucacuu

SEQ ID NO: 2058 - RNA, 21 nt, RNAi-antisense strand
gugacacagauuacuggaauu

SEQ ID NO: 2059 - DNA, 21 bp, Homo sapiens
taatctgtgtcacttatgagc

SEQ ID NO: 2060 - RNA, 21 nt, RNAi-sense strand
aucugugucacuuaugagcuu

SEQ ID NO: 2061 - RNA, 21 nt, RNAi-antisense strand
gcucauaagugacacagauuu

SEQ ID NO: 2062 - DNA, 21 bp, Homo sapiens
tatgagcacttgatcacaaag

SEQ ID NO: 2063 - RNA, 21 nt, RNAi-sense strand
ugagcacuugaucacaaaguu

SEQ ID NO: 2064 - RNA, 21 nt, RNAi-antisense strand
cuuugugaucaagugcucauu

SEQ ID NO: 2065 - DNA, 21 bp, Homo sapiens
taagcagtatgtcaacaagaa

SEQ ID NO: 2066 - RNA, 21 nt, RNAi-sense strand
agcaguaugucaacaagaauu

SEQ ID NO: 2067 - RNA, 21 nt, RNAi-antisense strand
uucuuguugacauacugcuuu

SEQ ID NO: 2068 - DNA, 21 bp, Homo sapiens
tatgtcaacaagaacagtaag

SEQ ID NO: 2069 - RNA, 21 nt, RNAi-sense strand
ugucaacaagaacaguaaguu

SEQ ID NO: 2070 - RNA, 21 nt, RNAi-antisense strand
cuuacuguucuuguugacauu

SEQ ID NO: 2071 - DNA, 21 bp, Homo sapiens
taagcatgaagagctaatgct

SEQ ID NO: 2072 - RNA, 21 nt, RNAi-sense strand
agcaugaagagcuaaugcuuu

SEQ ID NO: 2073 - RNA, 21 nt, RNAi-antisense strand
agcauuagcucuucaugcuuu

SEQ ID NO: 2074 - DNA, 21 bp, Homo sapiens
tattatacaactccagagaag

SEQ ID NO: 2075 - RNA, 21 nt, RNAi-sense strand
uuauacaacuccagagaaguu

SEQ ID NO: 2076 - RNA, 21 nt, RNAi-antisense strand
cuucucuggaguuguauaauu

SEQ ID NO: 2077 - DNA, 21 bp, Homo sapiens
tatacaactccagagaagagg

SEQ ID NO: 2078 - RNA, 21 nt, RNAi-sense strand
uacaacuccagagaagagguu

SEQ ID NO: 2079 - RNA, 21 nt, RNAi-antisense strand
ccucuucucuggaguuguauu

SEQ ID NO: 2080 - DNA, 21 bp, Homo sapiens
tacaactccagagaagaggat

SEQ ID NO: 2081 - RNA, 21 nt, RNAi-sense strand
caacuccagagaagaggauuu

SEQ ID NO: 2082 - RNA, 21 nt, RNAi-antisense strand
auccucuucucuggaguuguu

SEQ ID NO: 2083 - DNA, 21 bp, Homo sapiens
tatgtgatcaaccttatgaac

SEQ ID NO: 2084 - RNA, 21 nt, RNAi-sense strand
ugugaucaaccuuaugaacuu

SEQ ID NO: 2085 - RNA, 21 nt, RNAi-antisense strand
guucauaagguugaucacauu

SEQ ID NO: 2086 - DNA, 21 bp, Homo sapiens
taaggaaagaccaacaccttc

SEQ ID NO: 2087 - RNA, 21 nt, RNAi-sense strand
aggaaagaccaacaccuucuu

SEQ ID NO: 2088 - RNA, 21 nt, RNAi-antisense strand
gaagguguuggucuuuccuuu

SEQ ID NO: 2089 - DNA, 21 bp, Homo sapiens
taattgtactacatctgagga

SEQ ID NO: 2090 - RNA, 21 nt, RNAi-sense strand
auuguacuacaucugaggauu

SEQ ID NO: 2091 - RNA, 21 nt, RNAi-antisense strand
uccucagauguaguacaauuu

SEQ ID NO: 2092 - DNA, 21 bp, Homo sapiens
tactacatctgaggattcctt

SEQ ID NO: 2093 - RNA, 21 nt, RNAi-sense strand
cuacaucugaggauuccuuuu

SEQ ID NO: 2094 - RNA, 21 nt, RNAi-antisense strand
aaggaauccucagauguaguu

SEQ ID NO: 2095 - DNA, 21 bp, Homo sapiens
tacatctgaggattccttggt

SEQ ID NO: 2096 - RNA, 21 nt, RNAi-sense strand
caucugaggauuccuugguuu

SEQ ID NO: 2097 - RNA, 21 nt, RNAi-antisense strand
accaaggaauccucagauguu

SEQ ID NO: 2098 - DNA, 21 bp, Homo sapiens
tacaatagagtggctgttcaa

SEQ ID NO: 2099 - RNA, 21 nt, RNAi-sense strand
caauagaguggcuguucaauu

SEQ ID NO: 2100 - RNA, 21 nt, RNAi-antisense strand
uugaacagccacucuauuguu

SEQ ID NO: 2101 - DNA, 21 bp, Homo sapiens
tagagtggctgttcaaggaga

SEQ ID NO: 2102 - RNA, 21 nt, RNAi-sense strand
gaguggcuguucaaggagauu

SEQ ID NO: 2103 - RNA, 21 nt, RNAi-antisense strand
ucuccuugaacagccacucuu

SEQ ID NO: 2104 - DNA, 21 bp, Homo sapiens
tatttcttctaattcctcagc

SEQ ID NO: 2105 - RNA, 21 nt, RNAi-sense strand
uuucuucuaauuccucagcuu

SEQ ID NO: 2106 - RNA, 21 nt, RNAi-antisense strand
gcugaggaauuagaagaaauu

SEQ ID NO: 2107 - DNA, 21 bp, Homo sapiens
taattcctcagcaagtattct

SEQ ID NO: 2108 - RNA, 21 nt, RNAi-sense strand
auuccucagcaaguauucuuu

SEQ ID NO: 2109 - RNA, 21 nt, RNAi-antisense strand
agaauacuugcugaggaauuu

SEQ ID NO: 2110 - DNA, 21 bp, Homo sapiens
tatgatgaagttgctgcacaa

SEQ ID NO: 2111 - RNA, 21 nt, RNAi-sense strand
ugaugaaguugcugcacaauu

SEQ ID NO: 2112 - RNA, 21 nt, RNAi-antisense strand
uugugcagcaacuucaucauu

SEQ ID NO: 2113 - DNA, 21 bp, Homo sapiens
taaatgaagctgtagaatgct

SEQ ID NO: 2114 - RNA, 21 nt, RNAi-sense strand
aaugaagcuguagaaugcuuu

SEQ ID NO: 2115 - RNA, 21 nt, RNAi-antisense strand
agcauucuacagcuucauuuu

SEQ ID NO: 2116 - DNA, 21 bp, Homo sapiens
tatctcaaagttcggattcaa

SEQ ID NO: 2117 - RNA, 21 nt, RNAi-sense strand
ucucaaaguucggauucaauu

SEQ ID NO: 2118 - RNA, 21 nt, RNAi-antisense strand
uugaauccgaacuuugagauu

SEQ ID NO: 2119 - DNA, 21 bp, Homo sapiens
tagaaacaccagaagcgaaag

SEQ ID NO: 2120 - RNA, 21 nt, RNAi-sense strand
gaaacaccagaagcgaaaguu

SEQ ID NO: 2121 - RNA, 21 nt, RNAi-antisense strand
cuuucgcuucugguguuucuu

SEQ ID NO: 2122 - DNA, 21 bp, Homo sapiens
taaggatcaagtagatatagc

SEQ ID NO: 2123 - RNA, 21 nt, RNAi-sense strand
aggaucaaguagauauagcuu

SEQ ID NO: 2124 - RNA, 21 nt, RNAi-antisense strand
gcuauaucuacuugauccuuu

SEQ ID NO: 2125 - DNA, 21 bp, Homo sapiens
tagatatagctgttcaagaac

SEQ ID NO: 2126 - RNA, 21 nt, RNAi-sense strand
gauauagcuguucaagaacuu

SEQ ID NO: 2127 - RNA, 21 nt, RNAi-antisense strand
guucuugaacagcuauaucuu

SEQ ID NO: 2128 - DNA, 21 bp, Homo sapiens
tatagctgttcaagaactcct

SEQ ID NO: 2129 - RNA, 21 nt, RNAi-sense strand
uagcuguucaagaacuccuuu

SEQ ID NO: 2130 - RNA, 21 nt, RNAi-antisense strand
aggaguucuugaacagcuauu

SEQ ID NO: 2131 - DNA, 21 bp, Homo sapiens
tagctgttcaagaactccttc

SEQ ID NO: 2132 - RNA, 21 nt, RNAi-sense strand
gcuguucaagaacuccuucuu

SEQ ID NO: 2133 - RNA, 21 nt, RNAi-antisense strand
gaaggaguucuugaacagcuu

SEQ ID NO: 2134 - DNA, 21 bp, Homo sapiens
taaaggcacagtacaagtctt

SEQ ID NO: 2135 - RNA, 21 nt, RNAi-sense strand
aaggcacaguacaagucuuuu

SEQ ID NO: 2136 - RNA, 21 nt, RNAi-antisense strand
aagacuuguacugugccuuuu

SEQ ID NO: 2137 - DNA, 21 bp, Homo sapiens
tacaagtctttgataggagta

SEQ ID NO: 2138 - RNA, 21 nt, RNAi-sense strand
caagucuuugauaggaguauu

SEQ ID NO: 2139 - RNA, 21 nt, RNAi-antisense strand
uacuccuaucaaagacuuguu

SEQ ID NO: 2140 - DNA, 21 bp, Homo sapiens
taggagtagagtataagcctg

SEQ ID NO: 2141 - RNA, 21 nt, RNAi-sense strand
ggaguagaguauaagccuguu

SEQ ID NO: 2142 - RNA, 21 nt, RNAi-antisense strand
caggcuuauacucuacuccuu

SEQ ID NO: 2143 - DNA, 21 bp, Homo sapiens
tagagtataagcctgtgtcgg

SEQ ID NO: 2144 - RNA, 21 nt, RNAi-sense strand
gaguauaagccugugucgguu

SEQ ID NO: 2145 - RNA, 21 nt, RNAi-antisense strand
ccgacacaggcuuauacucuu

SEQ ID NO: 2146 - DNA, 21 bp, Homo sapiens
tataagcctgtgtcggccact

SEQ ID NO: 2147 - RNA, 21 nt, RNAi-sense strand
uaagccugugucggccacuuu

SEQ ID NO: 2148 - RNA, 21 nt, RNAi-antisense strand
aguggccgacacaggcuuauu

SEQ ID NO: 2149 - DNA, 21 bp, Homo sapiens
taagcctgtgtcggccactgg

SEQ ID NO: 2150 - RNA, 21 nt, RNAi-sense strand
agccugugucggccacugguu

SEQ ID NO: 2151 - RNA, 21 nt, RNAi-antisense strand
ccaguggccgacacaggcuuu

SEQ ID NO: 2152 - DNA, 21 bp, Homo sapiens
tattctcaggtcatcacaaag

SEQ ID NO: 2153 - RNA, 21 nt, RNAi-sense strand
uucucaggucaucacaaaguu

SEQ ID NO: 2154 - RNA, 21 nt, RNAi-antisense strand
cuuugugaugaccugagaauu

SEQ ID NO: 2155 - DNA, 21 bp, Homo sapiens
taccatgacataagtggctgt

SEQ ID NO: 2156 - RNA, 21 nt, RNAi-sense strand
ccaugacauaaguggcuguuu

SEQ ID NO: 2157 - RNA, 21 nt, RNAi-antisense strand
acagccacuuaugucaugguu

SEQ ID NO: 2158 - DNA, 21 bp, Homo sapiens
taagtggctgttatattcttc

SEQ ID NO: 2159 - RNA, 21 nt, RNAi-sense strand
aguggcuguuauauucuucuu

SEQ ID NO: 2160 - RNA, 21 nt, RNAi-antisense strand
gaagaauauaacagccacuuu

SEQ ID NO: 2161 - DNA, 21 bp, Homo sapiens
tagagaaagagaagactcatg

SEQ ID NO: 2162 - RNA, 21 nt, RNAi-sense strand
gagaaagagaagacucauguu

SEQ ID NO: 2163 - RNA, 21 nt, RNAi-antisense strand
caugagucuucucuuucucuu

SEQ ID NO: 2164 - DNA, 21 bp, Homo sapiens
tagtgaaacagtaatgtatcc

SEQ ID NO: 2165 - RNA, 21 nt, RNAi-sense strand
gugaaacaguaauguauccuu

SEQ ID NO: 2166 - RNA, 21 nt, RNAi-antisense strand
ggauacauuacuguuucacuu

SEQ ID NO: 2167 - DNA, 21 bp, Homo sapiens
taatgtatcctgcatatgcaa

SEQ ID NO: 2168 - RNA, 21 nt, RNAi-sense strand
auguauccugcauaugcaauu

SEQ ID NO: 2169 - RNA, 21 nt, RNAi-antisense strand
uugcauaugcaggauacauuu

SEQ ID NO: 2170 - DNA, 21 bp, Homo sapiens
tacaatcacacagagacctgc

SEQ ID NO: 2171 - RNA, 21 nt, RNAi-sense strand
caaucacacagagaccugcuu

SEQ ID NO: 2172 - RNA, 21 nt, RNAi-antisense strand
gcaggucucugugugauuguu

SEQ ID NO: 2173 - DNA, 21 bp, Homo sapiens
tacgtactcgtgaatttcttt

SEQ ID NO: 2174 - RNA, 21 nt, RNAi-sense strand
cguacucgugaauuucuuuuu

SEQ ID NO: 2175 - RNA, 21 nt, RNAi-antisense strand
aaagaaauucacgaguacguu

SEQ ID NO: 2176 - DNA, 21 bp, Homo sapiens
tactcgtgaatttctttggca

SEQ ID NO: 2177 - RNA, 21 nt, RNAi-sense strand
cucgugaauuucuuuggcauu

SEQ ID NO: 2178 - RNA, 21 nt, RNAi-antisense strand
ugccaaagaaauucacgaguu

SEQ ID NO: 2179 - DNA, 21 bp, Homo sapiens
taccatggaagaggcagcgga

SEQ ID NO: 2180 - RNA, 21 nt, RNAi-sense strand
ccauggaagaggcagcggauu

SEQ ID NO: 2181 - RNA, 21 nt, RNAi-antisense strand
uccgcugccucuuccaugguu

SEQ ID NO: 2182 - DNA, 21 bp, Homo sapiens
tacttgacttatatgctcagg

SEQ ID NO: 2183 - RNA, 21 nt, RNAi-sense strand
cuugacuuauaugcucagguu

SEQ ID NO: 2184 - RNA, 21 nt, RNAi-antisense strand
ccugagcauauaagucaaguu

SEQ ID NO: 2185 - DNA, 21 bp, Homo sapiens
tatatgctcaggtatatgaag

SEQ ID NO: 2186 - RNA, 21 nt, RNAi-sense strand
uaugcucagguauaugaaguu

SEQ ID NO: 2187 - RNA, 21 nt, RNAi-antisense strand
cuucauauaccugagcauauu

SEQ ID NO: 2188 - DNA, 21 bp, Homo sapiens
tatgctcaggtatatgaagaa

SEQ ID NO: 2189 - RNA, 21 nt, RNAi-sense strand
ugcucagguauaugaagaauu

SEQ ID NO: 2190 - RNA, 21 nt, RNAi-antisense strand
uucuucauauaccugagcauu

SEQ ID NO: 2191 - DNA, 21 bp, Homo sapiens
tatatgaagaactcctggcaa

SEQ ID NO: 2192 - RNA, 21 nt, RNAi-sense strand
uaugaagaacuccuggcaauu

SEQ ID NO: 2193 - RNA, 21 nt, RNAi-antisense strand
uugccaggaguucuucauauu

SEQ ID NO: 2194 - DNA, 21 bp, Homo sapiens
tatgaagaactcctggcaatt

SEQ ID NO: 2195 - RNA, 21 nt, RNAi-sense strand
ugaagaacuccuggcaauuuu

SEQ ID NO: 2196 - RNA, 21 nt, RNAi-antisense strand
aauugccaggaguucuucauu

SEQ ID NO: 2197 - DNA, 21 bp, Homo sapiens
tatatctgctagtggaagagc

SEQ ID NO: 2198 - RNA, 21 nt, RNAi-sense strand
uaucugcuaguggaagagcuu

SEQ ID NO: 2199 - RNA, 21 nt, RNAi-antisense strand
gcucuuccacuagcagauauu

SEQ ID NO: 2200 - DNA, 21 bp, Homo sapiens
tatctgctagtggaagagcta

SEQ ID NO: 2201 - RNA, 21 nt, RNAi-sense strand
ucugcuaguggaagagcuauu

SEQ ID NO: 2202 - RNA, 21 nt, RNAi-antisense strand
uagcucuuccacuagcagauu

SEQ ID NO: 2203 - DNA, 21 bp, Homo sapiens
taccaggagagaagcaatttg

SEQ ID NO: 2204 - RNA, 21 nt, RNAi-sense strand
ccaggagagaagcaauuuguu

SEQ ID NO: 2205 - RNA, 21 nt, RNAi-antisense strand
caaauugcuucucuccugguu

SEQ ID NO: 2206 - DNA, 21 bp, Homo sapiens
tattggtgttatgaccatggt

SEQ ID NO: 2207 - RNA, 21 nt, RNAi-sense strand
uugguguuaugaccaugguuu

SEQ ID NO: 2208 - RNA, 21 nt, RNAi-antisense strand
accauggucauaacaccaauu

SEQ ID NO: 2209 - DNA, 21 bp, Homo sapiens
tagcatgtgttcaggtggtga

SEQ ID NO: 2210 - RNA, 21 nt, RNAi-sense strand
gcauguguucagguggugauu

SEQ ID NO: 2211 - RNA, 21 nt, RNAi-antisense strand
ucaccaccugaacacaugcuu

SEQ ID NO: 2212 - DNA, 21 bp, Homo sapiens
tattccttgtggcattaccaa

SEQ ID NO: 2213 - RNA, 21 nt, RNAi-sense strand
uuccuuguggcauuaccaauu

SEQ ID NO: 2214 - RNA, 21 nt, RNAi-antisense strand
uugguaaugccacaaggaauu

SEQ ID NO: 2215 - DNA, 21 bp, Homo sapiens
taccaatgcactttctgaaga

SEQ ID NO: 2216 - RNA, 21 nt, RNAi-sense strand
ccaaugcacuuucugaagauu

SEQ ID NO: 2217 - RNA, 21 nt, RNAi-antisense strand
ucuucagaaagugcauugguu

SEQ ID NO: 2218 - DNA, 21 bp, Homo sapiens
tatcgaaggcgattactcagt

SEQ ID NO: 2219 - RNA, 21 nt, RNAi-sense strand
ucgaaggcgauuacucaguuu

SEQ ID NO: 2220 - RNA, 21 nt, RNAi-antisense strand
acugaguaaucgccuucgauu

SEQ ID NO: 2221 - DNA, 21 bp, Homo sapiens
tactcagtgttaacatccgcg

SEQ ID NO: 2222 - RNA, 21 nt, RNAi-sense strand
cucaguguuaacauccgcguu

SEQ ID NO: 2223 - RNA, 21 nt, RNAi-antisense strand
cgcggauguuaacacugaguu

SEQ ID NO: 2224 - DNA, 21 bp, Homo sapiens
taacatccgcgttagagctga

SEQ ID NO: 2225 - RNA, 21 nt, RNAi-sense strand
acauccgcguuagagcugauu

SEQ ID NO: 2226 - RNA, 21 nt, RNAi-antisense strand
ucagcucuaacgcggauguuu

SEQ ID NO: 2227 - DNA, 21 bp, Homo sapiens
tagagctgatttacgagataa

SEQ ID NO: 2228 - RNA, 21 nt, RNAi-sense strand
gagcugauuuacgagauaauu

SEQ ID NO: 2229 - RNA, 21 nt, RNAi-antisense strand
uuaucucguaaaucagcucuu

SEQ ID NO: 2230 - DNA, 21 bp, Homo sapiens
tacgagataattattctccag

SEQ ID NO: 2231 - RNA, 21 nt, RNAi-sense strand
cgagauaauuauucuccaguu

SEQ ID NO: 2232 - RNA, 21 nt, RNAi-antisense strand
cuggagaauaauuaucucguu

SEQ ID NO: 2233 - DNA, 21 bp, Homo sapiens
taattattctccaggttggaa

SEQ ID NO: 2234 - RNA, 21 nt, RNAi-sense strand
auuauucuccagguuggaauu

SEQ ID NO: 2235 - RNA, 21 nt, RNAi-antisense strand
uuccaaccuggagaauaauuu

SEQ ID NO: 2236 - DNA, 21 bp, Homo sapiens
tattctccaggttggaaattc

SEQ ID NO: 2237 - RNA, 21 nt, RNAi-sense strand
uucuccagguuggaaauucuu

SEQ ID NO: 2238 - RNA, 21 nt, RNAi-antisense strand
gaauuuccaaccuggagaauu

SEQ ID NO: 2239 - DNA, 21 bp, Homo sapiens
tatgaagagctgtcagtttgt

SEQ ID NO: 2240 - RNA, 21 nt, RNAi-sense strand
ugaagagcugucaguuuguuu

SEQ ID NO: 2241 - RNA, 21 nt, RNAi-antisense strand
acaaacugacagcucuucauu

SEQ ID NO: 2242 - DNA, 21 bp, Homo sapiens
tagccgtcagacgagatactg

SEQ ID NO: 2243 - RNA, 21 nt, RNAi-sense strand
gccgucagacgagauacuguu

SEQ ID NO: 2244 - RNA, 21 nt, RNAi-antisense strand
caguaucucgucugacggcuu

SEQ ID NO: 2245 - DNA, 21 bp, Homo sapiens
taagactcatatggttgtggc

SEQ ID NO: 2246 - RNA, 21 nt, RNAi-sense strand
agacucauaugguuguggcuu

SEQ ID NO: 2247 - RNA, 21 nt, RNAi-antisense strand
gccacaaccauaugagucuuu

SEQ ID NO: 2248 - DNA, 21 bp, Homo sapiens
tatggttgtggctaatacaat

SEQ ID NO: 2249 - RNA, 21 nt, RNAi-sense strand
ugguuguggcuaauacaauuu

SEQ ID NO: 2250 - RNA, 21 nt, RNAi-antisense strand
auuguauuagccacaaccauu

SEQ ID NO: 2251 - DNA, 21 bp, Homo sapiens
tacaatggaagactttcagaa

SEQ ID NO: 2252 - RNA, 21 nt, RNAi-sense strand
caauggaagacuuucagaauu

SEQ ID NO: 2253 - RNA, 21 nt, RNAi-antisense strand
uucugaaagucuuccauuguu

SEQ ID NO: 2254 - DNA, 21 bp, Homo sapiens
tactagattctggaaagattg

SEQ ID NO: 2255 - RNA, 21 nt, RNAi-sense strand
cuagauucuggaaagauuguu

SEQ ID NO: 2256 - RNA, 21 nt, RNAi-antisense strand
caaucuuuccagaaucuaguu

SEQ ID NO: 2257 - DNA, 21 bp, Homo sapiens
tagattctggaaagattgttc

SEQ ID NO: 2258 - RNA, 21 nt, RNAi-sense strand
gauucuggaaagauuguucuu

SEQ ID NO: 2259 - RNA, 21 nt, RNAi-antisense strand
gaacaaucuuuccagaaucuu

SEQ ID NO: 2260 - DNA, 21 bp, Homo sapiens
tactacaccttatttggtcgc

SEQ ID NO: 2261 - RNA, 21 nt, RNAi-sense strand
cuacaccuuauuuggucgcuu

SEQ ID NO: 2262 - RNA, 21 nt, RNAi-antisense strand
gcgaccaaauaagguguaguu

SEQ ID NO: 2263 - DNA, 21 bp, Homo sapiens
tacaccttatttggtcgcagc

SEQ ID NO: 2264 - RNA, 21 nt, RNAi-sense strand
caccuuauuuggucgcagcuu

SEQ ID NO: 2265 - RNA, 21 nt, RNAi-antisense strand
gcugcgaccaaauaagguguu

SEQ ID NO: 2266 - DNA, 21 bp, Homo sapiens
tatttggtcgcagctactgag

SEQ ID NO: 2267 - RNA, 21 nt, RNAi-sense strand
uuuggucgcagcuacugaguu

SEQ ID NO: 2268 - RNA, 21 nt, RNAi-antisense strand
cucaguagcugcgaccaaauu

SEQ ID NO: 2269 - DNA, 21 bp, Homo sapiens
tagtatcttctcagatacaga

SEQ ID NO: 2270 - RNA, 21 nt, RNAi-sense strand
guaucuucucagauacagauu

SEQ ID NO: 2271 - RNA, 21 nt, RNAi-antisense strand
ucuguaucugagaagauacuu

SEQ ID NO: 2272 - DNA, 21 bp, Homo sapiens
tatcttctcagatacagaccg

SEQ ID NO: 2273 - RNA, 21 nt, RNAi-sense strand
ucuucucagauacagaccguu

SEQ ID NO: 2274 - RNA, 21 nt, RNAi-antisense strand
cggucuguaucugagaagauu

SEQ ID NO: 2275 - DNA, 21 bp, Homo sapiens
tatgcctaagttaacagtgga

SEQ ID NO: 2276 - RNA, 21 nt, RNAi-sense strand
ugccuaaguuaacaguggauu

SEQ ID NO: 2277 - RNA, 21 nt, RNAi-antisense strand
uccacuguuaacuuaggcauu

SEQ ID NO: 2278 - DNA, 21 bp, Homo sapiens
aactccttgagtttagcagat

SEQ ID NO: 2279 - RNA, 21 nt, RNAi-sense strand
cuccuugaguuuagcagauuu

SEQ ID NO: 2280 - RNA, 21 nt, RNAi-antisense strand
aucugcuaaacucaaggaguu

SEQ ID NO: 2281 - DNA, 21 bp, Homo sapiens
aaaggttaccgtcagatttcc

SEQ ID NO: 2282 - RNA, 21 nt, RNAi-sense strand
agguuaccgucagauuuccuu

SEQ ID NO: 2283 - RNA, 21 nt, RNAi-antisense strand
ggaaaucugacgguaaccuuu

SEQ ID NO: 2284 - DNA, 21 bp, Homo sapiens
aaggttaccgtcagatttcct

SEQ ID NO: 2285 - RNA, 21 nt, RNAi-sense strand
gguuaccgucagauuuccuuu

SEQ ID NO: 2286 - RNA, 21 nt, RNAi-antisense strand
aggaaaucugacgguaaccuu

SEQ ID NO: 2287 - DNA, 21 bp, Homo sapiens
aatgttgcatatcaaaccaga

SEQ ID NO: 2288 - RNA, 21 nt, RNAi-sense strand
uguugcauaucaaaccagauu

SEQ ID NO: 2289 - RNA, 21 nt, RNAi-antisense strand
ucugguuugauaugcaacauu

SEQ ID NO: 2290 - DNA, 21 bp, Homo sapiens
aatatagtcggctaaatctca

SEQ ID NO: 2291 - RNA, 21 nt, RNAi-sense strand
uauagucggcuaaaucucauu

SEQ ID NO: 2292 - RNA, 21 nt, RNAi-antisense strand
ugagauuuagccgacuauauu

SEQ ID NO: 2293 - DNA, 21 bp, Homo sapiens
aacaacacagtgctatccaaa

SEQ ID NO: 2294 - RNA, 21 nt, RNAi-sense strand
caacacagugcuauccaaauu

SEQ ID NO: 2295 - RNA, 21 nt, RNAi-antisense strand
uuuggauagcacuguguuguu

SEQ ID NO: 2296 - DNA, 21 bp, Homo sapiens
aagatttcctacggttcgtgg

SEQ ID NO: 2297 - RNA, 21 nt, RNAi-sense strand
gauuuccuacgguucgugguu

SEQ ID NO: 2298 - RNA, 21 nt, RNAi-antisense strand
ccacgaaccguaggaaaucuu

SEQ ID NO: 2299 - DNA, 21 bp, Homo sapiens
aaagaatcctgaggttggctt

SEQ ID NO: 2300 - RNA, 21 nt, RNAi-sense strand
agaauccugagguuggcuuuu

SEQ ID NO: 2301 - RNA, 21 nt, RNAi-antisense strand
aagccaaccucaggauucuuu

SEQ ID NO: 2302 - DNA, 21 bp, Homo sapiens
aagaatcctgaggttggcttg

SEQ ID NO: 2303 - RNA, 21 nt, RNAi-sense strand
gaauccugagguuggcuuguu

SEQ ID NO: 2304 - RNA, 21 nt, RNAi-antisense strand
caagccaaccucaggauucuu

SEQ ID NO: 2305 - DNA, 21 bp, Homo sapiens
aaggtgctgatgcagagactt

SEQ ID NO: 2306 - RNA, 21 nt, RNAi-sense strand
ggugcugaugcagagacuuuu

SEQ ID NO: 2307 - RNA, 21 nt, RNAi-antisense strand
aagucucugcaucagcaccuu

SEQ ID NO: 2308 - DNA, 21 bp, Homo sapiens
aacaagaacagtaagcatgaa

SEQ ID NO: 2309 - RNA, 21 nt, RNAi-sense strand
caagaacaguaagcaugaauu

SEQ ID NO: 2310 - RNA, 21 nt, RNAi-antisense strand
uucaugcuuacuguucuuguu

SEQ ID NO: 2311 - DNA, 21 bp, Homo sapiens
aaggagatattatacaactcc

SEQ ID NO: 2312 - RNA, 21 nt, RNAi-sense strand
ggagauauuauacaacuccuu

SEQ ID NO: 2313 - RNA, 21 nt, RNAi-antisense strand
ggaguuguauaauaucuccuu

SEQ ID NO: 2314 - DNA, 21 bp, Homo sapiens
aattgtactacatctgaggat

SEQ ID NO: 2315 - RNA, 21 nt, RNAi-sense strand
uuguacuacaucugaggauuu

SEQ ID NO: 2316 - RNA, 21 nt, RNAi-antisense strand
auccucagauguaguacaauu

SEQ ID NO: 2317 - DNA, 21 bp, Homo sapiens
aaggagatgtggttcgtgaat

SEQ ID NO: 2318 - RNA, 21 nt, RNAi-sense strand
ggagaugugguucgugaauuu

SEQ ID NO: 2319 - RNA, 21 nt, RNAi-antisense strand
auucacgaaccacaucuccuu

SEQ ID NO: 2320 - DNA, 21 bp, Homo sapiens
aaggaagatgtagatgcagct

SEQ ID NO: 2321 - RNA, 21 nt, RNAi-sense strand
ggaagauguagaugcagcuuu

SEQ ID NO: 2322 - RNA, 21 nt, RNAi-antisense strand
agcugcaucuacaucuuccuu

SEQ ID NO: 2323 - DNA, 21 bp, Homo sapiens
aaactggccaggaatataaac

SEQ ID NO: 2324 - RNA, 21 nt, RNAi-sense strand
acuggccaggaauauaaacuu

SEQ ID NO: 2325 - RNA, 21 nt, RNAi-antisense strand
guuuauauuccuggccaguuu

SEQ ID NO: 2326 - DNA, 21 bp, Homo sapiens
aactggccaggaatataaacc

SEQ ID NO: 2327 - RNA, 21 nt, RNAi-sense strand
cuggccaggaauauaaaccuu

SEQ ID NO: 2328 - RNA, 21 nt, RNAi-antisense strand
gguuuauauuccuggccaguu

SEQ ID NO: 2329 - DNA, 21 bp, Homo sapiens
aaggagtacatacctggtcag

SEQ ID NO: 2330 - RNA, 21 nt, RNAi-sense strand
ggaguacauaccuggucaguu

SEQ ID NO: 2331 - RNA, 21 nt, RNAi-antisense strand
cugaccagguauguacuccuu

SEQ ID NO: 2332 - DNA, 21 bp, Homo sapiens
aacctgctggtttagaaacac

SEQ ID NO: 2333 - RNA, 21 nt, RNAi-sense strand
ccugcugguuuagaaacacuu

SEQ ID NO: 2334 - RNA, 21 nt, RNAi-antisense strand
guguuucuaaaccagcagguu

SEQ ID NO: 2335 - DNA, 21 bp, Homo sapiens
aagaactccttcagctaaagg

SEQ ID NO: 2336 - RNA, 21 nt, RNAi-sense strand
gaacuccuucagcuaaagguu

SEQ ID NO: 2337 - RNA, 21 nt, RNAi-antisense strand
ccuuuagcugaaggaguucuu

SEQ ID NO: 2338 - DNA, 21 bp, Homo sapiens
aactccttcagctaaaggcac

SEQ ID NO: 2339 - RNA, 21 nt, RNAi-sense strand
cuccuucagcuaaaggcacuu

SEQ ID NO: 2340 - RNA, 21 nt, RNAi-antisense strand
gugccuuuagcugaaggaguu

SEQ ID NO: 2341 - DNA, 21 bp, Homo sapiens
aaaggcacagtacaagtcttt

SEQ ID NO: 2342 - RNA, 21 nt, RNAi-sense strand
aggcacaguacaagucuuuuu

SEQ ID NO: 2343 - RNA, 21 nt, RNAi-antisense strand
aaagacuuguacugugccuuu

SEQ ID NO: 2344 - DNA, 21 bp, Homo sapiens
aaggcacagtacaagtctttg

SEQ ID NO: 2345 - RNA, 21 nt, RNAi-sense strand
ggcacaguacaagucuuuguu

SEQ ID NO: 2346 - RNA, 21 nt, RNAi-antisense strand
caaagacuuguacugugccuu

SEQ ID NO: 2347 - DNA, 21 bp, Homo sapiens
aagtctttgataggagtagag

SEQ ID NO: 2348 - RNA, 21 nt, RNAi-sense strand
gucuuugauaggaguagaguu

SEQ ID NO: 2349 - RNA, 21 nt, RNAi-antisense strand
cucuacuccuaucaaagacuu

SEQ ID NO: 2350 - DNA, 21 bp, Homo sapiens
aaagcagaataagcctcagaa

SEQ ID NO: 2351 - RNA, 21 nt, RNAi-sense strand
agcagaauaagccucagaauu

SEQ ID NO: 2352 - RNA, 21 nt, RNAi-antisense strand
uucugaggcuuauucugcuuu

SEQ ID NO: 2353 - DNA, 21 bp, Homo sapiens
aatcttgctgattggtattct

SEQ ID NO: 2354 - RNA, 21 nt, RNAi-sense strand
ucuugcugauugguauucuuu

SEQ ID NO: 2355 - RNA, 21 nt, RNAi-antisense strand
agaauaccaaucagcaagauu

SEQ ID NO: 2356 - DNA, 21 bp, Homo sapiens
aaccaattgccattcgtccta

SEQ ID NO: 2357 - RNA, 21 nt, RNAi-sense strand
ccaauugccauucguccuauu

SEQ ID NO: 2358 - RNA, 21 nt, RNAi-antisense strand
uaggacgaauggcaauugguu

SEQ ID NO: 2359 - DNA, 21 bp, Homo sapiens
aaacagtaatgtatcctgcat

SEQ ID NO: 2360 - RNA, 21 nt, RNAi-sense strand
acaguaauguauccugcauuu

SEQ ID NO: 2361 - RNA, 21 nt, RNAi-antisense strand
augcaggauacauuacuguuu

SEQ ID NO: 2362 - DNA, 21 bp, Homo sapiens
aacagtaatgtatcctgcata

SEQ ID NO: 2363 - RNA, 21 nt, RNAi-sense strand
caguaauguauccugcauauu

SEQ ID NO: 2364 - RNA, 21 nt, RNAi-antisense strand
uaugcaggauacauuacuguu

SEQ ID NO: 2365 - DNA, 21 bp, Homo sapiens
aagctcaatcagtggtgcaat

SEQ ID NO: 2366 - RNA, 21 nt, RNAi-sense strand
gcucaaucaguggugcaauuu

SEQ ID NO: 2367 - RNA, 21 nt, RNAi-antisense strand
auugcaccacugauugagcuu

SEQ ID NO: 2368 - DNA, 21 bp, Homo sapiens
aagaactcctggcaattcctg

SEQ ID NO: 2369 - RNA, 21 nt, RNAi-sense strand
gaacuccuggcaauuccuguu

SEQ ID NO: 2370 - RNA, 21 nt, RNAi-antisense strand
caggaauugccaggaguucuu

SEQ ID NO: 2371 - DNA, 21 bp, Homo sapiens
aagacaaagaagcgctgattg

SEQ ID NO: 2372 - RNA, 21 nt, RNAi-sense strand
gacaaagaagcgcugauuguu

SEQ ID NO: 2373 - RNA, 21 nt, RNAi-antisense strand
caaucagcgcuucuuugucuu

SEQ ID NO: 2374 - DNA, 21 bp, Homo sapiens
aatgattatcgaaggcgatta

SEQ ID NO: 2375 - RNA, 21 nt, RNAi-sense strand
ugauuaucgaaggcgauuauu

SEQ ID NO: 2376 - RNA, 21 nt, RNAi-antisense strand
uaaucgccuucgauaaucauu

SEQ ID NO: 2377 - DNA, 21 bp, Homo sapiens
aaggcgattactcagtgttaa

SEQ ID NO: 2378 - RNA, 21 nt, RNAi-sense strand
ggcgauuacucaguguuaauu

SEQ ID NO: 2379 - RNA, 21 nt, RNAi-antisense strand
uuaacacugaguaaucgccuu

SEQ ID NO: 2380 - DNA, 21 bp, Homo sapiens
aacatccgcgttagagctgat

SEQ ID NO: 2381 - RNA, 21 nt, RNAi-sense strand
cauccgcguuagagcugauuu

SEQ ID NO: 2382 - RNA, 21 nt, RNAi-antisense strand
aucagcucuaacgcggauguu

SEQ ID NO: 2383 - DNA, 21 bp, Homo sapiens
aagagctgtcagtttgtagcc

SEQ ID NO: 2384 - RNA, 21 nt, RNAi-sense strand
gagcugucaguuuguagccuu

SEQ ID NO: 2385 - RNA, 21 nt, RNAi-antisense strand
ggcuacaaacugacagcucuu

SEQ ID NO: 2386 - DNA, 21 bp, Homo sapiens
aagaccttaagactcatatgg

SEQ ID NO: 2387 - RNA, 21 nt, RNAi-sense strand
gaccuuaagacucauaugguu

SEQ ID NO: 2388 - RNA, 21 nt, RNAi-antisense strand
ccauaugagucuuaaggucuu

SEQ ID NO: 2389 - DNA, 21 bp, Homo sapiens
aagactcatatggttgtggct

SEQ ID NO: 2390 - RNA, 21 nt, RNAi-sense strand
gacucauaugguuguggcuuu

SEQ ID NO: 2391 - RNA, 21 nt, RNAi-antisense strand
agccacaaccauaugagucuu

SEQ ID NO: 2392 - DNA, 21 bp, Homo sapiens
aagattgttcagattccattc

SEQ ID NO: 2393 - RNA, 21 nt, RNAi-sense strand
gauuguucagauuccauucuu

SEQ ID NO: 2394 - RNA, 21 nt, RNAi-antisense strand
gaauggaaucugaacaaucuu

SEQ ID NO: 2395 - DNA, 21 bp, Homo sapiens
cagtcagtaggtaccaagtgg

SEQ ID NO: 2396 - RNA, 21 nt, RNAi-sense strand
gucaguagguaccaagugguu

SEQ ID NO: 2397 - RNA, 21 nt, RNAi-antisense strand
ccacuugguaccuacugacuu

SEQ ID NO: 2398 - DNA, 21 bp, Homo sapiens
caacaaccaaagctcgagtgg

SEQ ID NO: 2399 - RNA, 21 nt, RNAi-sense strand
acaaccaaagcucgagugguu

SEQ ID NO: 2400 - RNA, 21 nt, RNAi-antisense strand
ccacucgagcuuugguuguuu

SEQ ID NO: 2401 - DNA, 21 bp, Homo sapiens
cagaggccagtggttacttac

SEQ ID NO: 2402 - RNA, 21 nt, RNAi-sense strand
gaggccagugguuacuuacuu

SEQ ID NO: 2403 - RNA, 21 nt, RNAi-antisense strand
guaaguaaccacuggccucuu

SEQ ID NO: 2404 - DNA, 21 bp, Homo sapiens
cagtggttacttacacattgg

SEQ ID NO: 2405 - RNA, 21 nt, RNAi-sense strand
gugguuacuuacacauugguu

SEQ ID NO: 2406 - RNA, 21 nt, RNAi-antisense strand
ccaauguguaaguaaccacuu

SEQ ID NO: 2407 - DNA, 21 bp, Homo sapiens
cagcactaccaggttaacttt

SEQ ID NO: 2408 - RNA, 21 nt, RNAi-sense strand
gcacuaccagguuaacuuuuu

SEQ ID NO: 2409 - RNA, 21 nt, RNAi-antisense strand
aaaguuaaccugguagugcuu

SEQ ID NO: 2410 - DNA, 21 bp, Homo sapiens
caatgttgcatatcaaaccag

SEQ ID NO: 2411 - RNA, 21 nt, RNAi-sense strand
auguugcauaucaaaccaguu

SEQ ID NO: 2412 - RNA, 21 nt, RNAi-antisense strand
cugguuugauaugcaacauuu

SEQ ID NO: 2413 - DNA, 21 bp, Homo sapiens
cagatgaaagcagaacgtgag

SEQ ID NO: 2414 - RNA, 21 nt, RNAi-sense strand
gaugaaagcagaacgugaguu

SEQ ID NO: 2415 - RNA, 21 nt, RNAi-antisense strand
cucacguucugcuuucaucuu

SEQ ID NO: 2416 - DNA, 21 bp, Homo sapiens
cagaacgtgagcagaggatag

SEQ ID NO: 2417 - RNA, 21 nt, RNAi-sense strand
gaacgugagcagaggauaguu

SEQ ID NO: 2418 - RNA, 21 nt, RNAi-antisense strand
cuauccucugcucacguucuu

SEQ ID NO: 2419 - DNA, 21 bp, Homo sapiens
cagtttggtcactcctgttgt

SEQ ID NO: 2420 - RNA, 21 nt, RNAi-sense strand
guuuggucacuccuguuguuu

SEQ ID NO: 2421 - RNA, 21 nt, RNAi-antisense strand
acaacaggagugaccaaacuu

SEQ ID NO: 2422 - DNA, 21 bp, Homo sapiens
catgagtagtaacaatggatg

SEQ ID NO: 2423 - RNA, 21 nt, RNAi-sense strand
ugaguaguaacaauggauguu

SEQ ID NO: 2424 - RNA, 21 nt, RNAi-antisense strand
cauccauuguuacuacucauu

SEQ ID NO: 2425 - DNA, 21 bp, Homo sapiens
catagttgacagcatcgaagg

SEQ ID NO: 2426 - RNA, 21 nt, RNAi-sense strand
uaguugacagcaucgaagguu

SEQ ID NO: 2427 - RNA, 21 nt, RNAi-antisense strand
ccuucgaugcugucaacuauu

SEQ ID NO: 2428 - DNA, 21 bp, Homo sapiens
cagcatcgaaggtgttacaca

SEQ ID NO: 2429 - RNA, 21 nt, RNAi-sense strand
gcaucgaagguguuacacauu

SEQ ID NO: 2430 - RNA, 21 nt, RNAi-antisense strand
uguguaacaccuucgaugcuu

SEQ ID NO: 2431 - DNA, 21 bp, Homo sapiens
catcgaaggtgttacacatgc

SEQ ID NO: 2432 - RNA, 21 nt, RNAi-sense strand
ucgaagguguuacacaugcuu

SEQ ID NO: 2433 - RNA, 21 nt, RNAi-antisense strand
gcauguguaacaccuucgauu

SEQ ID NO: 2434 - DNA, 21 bp, Homo sapiens
caacaacacagtgctatccaa

SEQ ID NO: 2435 - RNA, 21 nt, RNAi-sense strand
acaacacagugcuauccaauu

SEQ ID NO: 2436 - RNA, 21 nt, RNAi-antisense strand
uuggauagcacuguguuguuu

SEQ ID NO: 2437 - DNA, 21 bp, Homo sapiens
caagatttcctacggttcgtg

SEQ ID NO: 2438 - RNA, 21 nt, RNAi-sense strand
agauuuccuacgguucguguu

SEQ ID NO: 2439 - RNA, 21 nt, RNAi-antisense strand
cacgaaccguaggaaaucuuu

SEQ ID NO: 2440 - DNA, 21 bp, Homo sapiens
cagtggctccacgatatgttg

SEQ ID NO: 2441 - RNA, 21 nt, RNAi-sense strand
guggcuccacgauauguuguu

SEQ ID NO: 2442 - RNA, 21 nt, RNAi-antisense strand
caacauaucguggagccacuu

SEQ ID NO: 2443 - DNA, 21 bp, Homo sapiens
cacgatatgttgcattactga

SEQ ID NO: 2444 - RNA, 21 nt, RNAi-sense strand
cgauauguugcauuacugauu

SEQ ID NO: 2445 - RNA, 21 nt, RNAi-antisense strand
ucaguaaugcaacauaucguu

SEQ ID NO: 2446 - DNA, 21 bp, Homo sapiens
cagtgaatgtacctgaagctc

SEQ ID NO: 2447 - RNA, 21 nt, RNAi-sense strand
gugaauguaccugaagcucuu

SEQ ID NO: 2448 - RNA, 21 nt, RNAi-antisense strand
gagcuucagguacauucacuu

SEQ ID NO: 2449 - DNA, 21 bp, Homo sapiens
cacttggcttgcagagactac

SEQ ID NO: 2450 - RNA, 21 nt, RNAi-sense strand
cuuggcuugcagagacuacuu

SEQ ID NO: 2451 - RNA, 21 nt, RNAi-antisense strand
guagucucugcaagccaaguu

SEQ ID NO: 2452 - DNA, 21 bp, Homo sapiens
cacttatgagcacttgatcac

SEQ ID NO: 2453 - RNA, 21 nt, RNAi-sense strand
cuuaugagcacuugaucacuu

SEQ ID NO: 2454 - RNA, 21 nt, RNAi-antisense strand
gugaucaagugcucauaaguu

SEQ ID NO: 2455 - DNA, 21 bp, Homo sapiens
cacaaagccagtgctaggaaa

SEQ ID NO: 2456 - RNA, 21 nt, RNAi-sense strand
caaagccagugcuaggaaauu

SEQ ID NO: 2457 - RNA, 21 nt, RNAi-antisense strand
uuuccuagcacuggcuuuguu

SEQ ID NO: 2458 - DNA, 21 bp, Homo sapiens
caagaacagtaagcatgaaga

SEQ ID NO: 2459 - RNA, 21 nt, RNAi-sense strand
agaacaguaagcaugaagauu

SEQ ID NO: 2460 - RNA, 21 nt, RNAi-antisense strand
ucuucaugcuuacuguucuuu

SEQ ID NO: 2461 - DNA, 21 bp, Homo sapiens
caaccttatgaacctgttagc

SEQ ID NO: 2462 - RNA, 21 nt, RNAi-sense strand
accuuaugaaccuguuagcuu

SEQ ID NO: 2463 - RNA, 21 nt, RNAi-antisense strand
gcuaacagguucauaagguuu

SEQ ID NO: 2464 - DNA, 21 bp, Homo sapiens
caaggagatgtggttcgtgaa

SEQ ID NO: 2465 - RNA, 21 nt, RNAi-sense strand
aggagaugugguucgugaauu

SEQ ID NO: 2466 - RNA, 21 nt, RNAi-antisense strand
uucacgaaccacaucuccuuu

SEQ ID NO: 2467 - DNA, 21 bp, Homo sapiens
caagtctttgataggagtaga

SEQ ID NO: 2468 - RNA, 21 nt, RNAi-sense strand
agucuuugauaggaguagauu

SEQ ID NO: 2469 - RNA, 21 nt, RNAi-antisense strand
ucuacuccuaucaaagacuuu

SEQ ID NO: 2470 - DNA, 21 bp, Homo sapiens
cagtaatgtatcctgcatatg

SEQ ID NO: 2471 - RNA, 21 nt, RNAi-sense strand
guaauguauccugcauauguu

SEQ ID NO: 2472 - RNA, 21 nt, RNAi-antisense strand
cauaugcaggauacauuacuu

SEQ ID NO: 2473 - DNA, 21 bp, Homo sapiens
catcaagctcaatcagtggtg

SEQ ID NO: 2474 - RNA, 21 nt, RNAi-sense strand
ucaagcucaaucagugguguu

SEQ ID NO: 2475 - RNA, 21 nt, RNAi-antisense strand
caccacugauugagcuugauu

SEQ ID NO: 2476 - DNA, 21 bp, Homo sapiens
caagctcaatcagtggtgcaa

SEQ ID NO: 2477 - RNA, 21 nt, RNAi-sense strand
agcucaaucaguggugcaauu

SEQ ID NO: 2478 - RNA, 21 nt, RNAi-antisense strand
uugcaccacugauugagcuuu

SEQ ID NO: 2479 - DNA, 21 bp, Homo sapiens
cagcctttcctacgtactcgt

SEQ ID NO: 2480 - RNA, 21 nt, RNAi-sense strand
gccuuuccuacguacucguuu

SEQ ID NO: 2481 - RNA, 21 nt, RNAi-antisense strand
acgaguacguaggaaaggcuu

SEQ ID NO: 2482 - DNA, 21 bp, Homo sapiens
caggaggagactatacaacta

SEQ ID NO: 2483 - RNA, 21 nt, RNAi-sense strand
ggaggagacuauacaacuauu

SEQ ID NO: 2484 - RNA, 21 nt, RNAi-antisense strand
uaguuguauagucuccuccuu

SEQ ID NO: 2485 - DNA, 21 bp, Homo sapiens
caactcgaactattggtgtta

SEQ ID NO: 2486 - RNA, 21 nt, RNAi-sense strand
acucgaacuauugguguuauu

SEQ ID NO: 2487 - RNA, 21 nt, RNAi-antisense strand
uaacaccaauaguucgaguuu

SEQ ID NO: 2488 - DNA, 21 bp, Homo sapiens
caggtggtgattattccttgt

SEQ ID NO: 2489 - RNA, 21 nt, RNAi-sense strand
gguggugauuauuccuuguuu

SEQ ID NO: 2490 - RNA, 21 nt, RNAi-antisense strand
acaaggaauaaucaccaccuu

SEQ ID NO: 2491 - DNA, 21 bp, Homo sapiens
caaagaagcgctgattgcaaa

SEQ ID NO: 2492 - RNA, 21 nt, RNAi-sense strand
aagaagcgcugauugcaaauu

SEQ ID NO: 2493 - RNA, 21 nt, RNAi-antisense strand
uuugcaaucagcgcuucuuuu

SEQ ID NO: 2494 - DNA, 21 bp, Homo sapiens
caatgattatcgaaggcgatt

SEQ ID NO: 2495 - RNA, 21 nt, RNAi-sense strand
augauuaucgaaggcgauuuu

SEQ ID NO: 2496 - RNA, 21 nt, RNAi-antisense strand
aaucgccuucgauaaucauuu

SEQ ID NO: 2497 - DNA, 21 bp, Homo sapiens
cagtgttaacatccgcgttag

SEQ ID NO: 2498 - RNA, 21 nt, RNAi-sense strand
guguuaacauccgcguuaguu

SEQ ID NO: 2499 - RNA, 21 nt, RNAi-antisense strand
cuaacgcggauguuaacacuu

SEQ ID NO: 2500 - DNA, 21 bp, Homo sapiens
catccgcgttagagctgattt

SEQ ID NO: 2501 - RNA, 21 nt, RNAi-sense strand
uccgcguuagagcugauuuuu

SEQ ID NO: 2502 - RNA, 21 nt, RNAi-antisense strand
aaaucagcucuaacgcggauu

SEQ ID NO: 2503 - DNA, 21 bp, Homo sapiens
cacgtgatatgaagagctgtc

SEQ ID NO: 2504 - RNA, 21 nt, RNAi-sense strand
cgugauaugaagagcugucuu

SEQ ID NO: 2505 - RNA, 21 nt, RNAi-antisense strand
gacagcucuucauaucacguu

SEQ ID NO: 2506 - DNA, 21 bp, Homo sapiens
cagtttgtagccgtcagacga

SEQ ID NO: 2507 - RNA, 21 nt, RNAi-sense strand
guuuguagccgucagacgauu

SEQ ID NO: 2508 - RNA, 21 nt, RNAi-antisense strand
ucgucugacggcuacaaacuu

SEQ ID NO: 2509 - DNA, 21 bp, Homo sapiens
cagagactaaacttcaagcta

SEQ ID NO: 2510 - RNA, 21 nt, RNAi-sense strand
gagacuaaacuucaagcuauu

SEQ ID NO: 2511 - RNA, 21 nt, RNAi-antisense strand
uagcuugaaguuuagucucuu

SEQ ID NO: 2512 - DNA, 21 bp, Homo sapiens
catatggttgtggctaataca

SEQ ID NO: 2513 - RNA, 21 nt, RNAi-sense strand
uaugguuguggcuaauacauu

SEQ ID NO: 2514 - RNA, 21 nt, RNAi-antisense strand
uguauuagccacaaccauauu

SEQ ID NO: 2515 - DNA, 21 bp, Homo sapiens
cagaagatactagattctgga

SEQ ID NO: 2516 - RNA, 21 nt, RNAi-sense strand
gaagauacuagauucuggauu

SEQ ID NO: 2517 - RNA, 21 nt, RNAi-antisense strand
uccagaaucuaguaucuucuu

SEQ ID NO: 2518 - DNA, 21 bp, Homo sapiens
gaaaggttaccgtcagatttc

SEQ ID NO: 2519 - RNA, 21 nt, RNAi-sense strand
aagguuaccgucagauuucuu

SEQ ID NO: 2520 - RNA, 21 nt, RNAi-antisense strand
gaaaucugacgguaaccuuuu

SEQ ID NO: 2521 - DNA, 21 bp, Homo sapiens
gaggccagtggttacttacac

SEQ ID NO: 2522 - RNA, 21 nt, RNAi-sense strand
ggccagugguuacuuacacuu

SEQ ID NO: 2523 - RNA, 21 nt, RNAi-antisense strand
guguaaguaaccacuggccuu

SEQ ID NO: 2524 - DNA, 21 bp, Homo sapiens
gatgatactcctgctgaacag

SEQ ID NO: 2525 - RNA, 21 nt, RNAi-sense strand
ugauacuccugcugaacaguu

SEQ ID NO: 2526 - RNA, 21 nt, RNAi-antisense strand
cuguucagcaggaguaucauu

SEQ ID NO: 2527 - DNA, 21 bp, Homo sapiens
gacatgagtagtaacaatgga

SEQ ID NO: 2528 - RNA, 21 nt, RNAi-sense strand
caugaguaguaacaauggauu

SEQ ID NO: 2529 - RNA, 21 nt, RNAi-antisense strand
uccauuguuacuacucauguu

SEQ ID NO: 2530 - DNA, 21 bp, Homo sapiens
gagtagtaacaatggatgcat

SEQ ID NO: 2531 - RNA, 21 nt, RNAi-sense strand
guaguaacaauggaugcauuu

SEQ ID NO: 2532 - RNA, 21 nt, RNAi-antisense strand
augcauccauuguuacuacuu

SEQ ID NO: 2533 - DNA, 21 bp, Homo sapiens
gacagcatcgaaggtgttaca

SEQ ID NO: 2534 - RNA, 21 nt, RNAi-sense strand
cagcaucgaagguguuacauu

SEQ ID NO: 2535 - RNA, 21 nt, RNAi-antisense strand
uguaacaccuucgaugcuguu

SEQ ID NO: 2536 - DNA, 21 bp, Homo sapiens
gaatatagtcggctaaatctc

SEQ ID NO: 2537 - RNA, 21 nt, RNAi-sense strand
auauagucggcuaaaucucuu

SEQ ID NO: 2538 - RNA, 21 nt, RNAi-antisense strand
gagauuuagccgacuauauuu

SEQ ID NO: 2539 - DNA, 21 bp, Homo sapiens
gaaggactagtagatggatgg

SEQ ID NO: 2540 - RNA, 21 nt, RNAi-sense strand
aggacuaguagauggaugguu

SEQ ID NO: 2541 - RNA, 21 nt, RNAi-antisense strand
ccauccaucuacuaguccuuu

SEQ ID NO: 2542 - DNA, 21 bp, Homo sapiens
gatttcctacggttcgtggtg

SEQ ID NO: 2543 - RNA, 21 nt, RNAi-sense strand
uuuccuacgguucgugguguu

SEQ ID NO: 2544 - RNA, 21 nt, RNAi-antisense strand
caccacgaaccguaggaaauu

SEQ ID NO: 2545 - DNA, 21 bp, Homo sapiens
gaaacagtttattgctgctca

SEQ ID NO: 2546 - RNA, 21 nt, RNAi-sense strand
aacaguuuauugcugcucauu

SEQ ID NO: 2547 - RNA, 21 nt, RNAi-antisense strand
ugagcagcaauaaacuguuuu

SEQ ID NO: 2548 - DNA, 21 bp, Homo sapiens
gaagcctgtgtggtatagtcc

SEQ ID NO: 2549 - RNA, 21 nt, RNAi-sense strand
agccugugugguauaguccuu

SEQ ID NO: 2550 - RNA, 21 nt, RNAi-antisense strand
ggacuauaccacacaggcuuu

SEQ ID NO: 2551 - DNA, 21 bp, Homo sapiens
gaaggtgctgatgcagagact

SEQ ID NO: 2552 - RNA, 21 nt, RNAi-sense strand
aggugcugaugcagagacuuu

SEQ ID NO: 2553 - RNA, 21 nt, RNAi-antisense strand
agucucugcaucagcaccuuu

SEQ ID NO: 2554 - DNA, 21 bp, Homo sapiens
gatcaaccttatgaacctgtt

SEQ ID NO: 2555 - RNA, 21 nt, RNAi-sense strand
ucaaccuuaugaaccuguuuu

SEQ ID NO: 2556 - RNA, 21 nt, RNAi-antisense strand
aacagguucauaagguugauu

SEQ ID NO: 2557 - DNA, 21 bp, Homo sapiens
gaaggagtacatacctggtca

SEQ ID NO: 2558 - RNA, 21 nt, RNAi-sense strand
aggaguacauaccuggucauu

SEQ ID NO: 2559 - RNA, 21 nt, RNAi-antisense strand
ugaccagguauguacuccuuu

SEQ ID NO: 2560 - DNA, 21 bp, Homo sapiens
gaacctgctggtttagaaaca

SEQ ID NO: 2561 - RNA, 21 nt, RNAi-sense strand
accugcugguuuagaaacauu

SEQ ID NO: 2562 - RNA, 21 nt, RNAi-antisense strand
uguuucuaaaccagcagguuu

SEQ ID NO: 2563 - DNA, 21 bp, Homo sapiens
gaactccttcagctaaaggca

SEQ ID NO: 2564 - RNA, 21 nt, RNAi-sense strand
acuccuucagcuaaaggcauu

SEQ ID NO: 2565 - RNA, 21 nt, RNAi-antisense strand
ugccuuuagcugaaggaguuu

SEQ ID NO: 2566 - DNA, 21 bp, Homo sapiens
gataggagtagagtataagcc

SEQ ID NO: 2567 - RNA, 21 nt, RNAi-sense strand
uaggaguagaguauaagccuu

SEQ ID NO: 2568 - RNA, 21 nt, RNAi-antisense strand
ggcuuauacucuacuccuauu

SEQ ID NO: 2569 - DNA, 21 bp, Homo sapiens
gaataccatgacataagtggc

SEQ ID NO: 2570 - RNA, 21 nt, RNAi-sense strand
auaccaugacauaaguggcuu

SEQ ID NO: 2571 - RNA, 21 nt, RNAi-antisense strand
gccacuuaugucaugguauuu

SEQ ID NO: 2572 - DNA, 21 bp, Homo sapiens
gaagaactcctggcaattcct

SEQ ID NO: 2573 - RNA, 21 nt, RNAi-sense strand
agaacuccuggcaauuccuuu

SEQ ID NO: 2574 - RNA, 21 nt, RNAi-antisense strand
aggaauugccaggaguucuuu

SEQ ID NO: 2575 - DNA, 21 bp, Homo sapiens
gaagatccaaagataccagga

SEQ ID NO: 2576 - RNA, 21 nt, RNAi-sense strand
agauccaaagauaccaggauu

SEQ ID NO: 2577 - RNA, 21 nt, RNAi-antisense strand
uccugguaucuuuggaucuuu

SEQ ID NO: 2578 - DNA, 21 bp, Homo sapiens
gagagaagcaatttgcctatc

SEQ ID NO: 2579 - RNA, 21 nt, RNAi-sense strand
gagaagcaauuugccuaucuu

SEQ ID NO: 2580 - RNA, 21 nt, RNAi-antisense strand
gauaggcaaauugcuucucuu

SEQ ID NO: 2581 - DNA, 21 bp, Homo sapiens
gacaactcgaactattggtgt

SEQ ID NO: 2582 - RNA, 21 nt, RNAi-sense strand
caacucgaacuauugguguuu

SEQ ID NO: 2583 - RNA, 21 nt, RNAi-antisense strand
acaccaauaguucgaguuguu

SEQ ID NO: 2584 - DNA, 21 bp, Homo sapiens
gaagacaaagaagcgctgatt

SEQ ID NO: 2585 - RNA, 21 nt, RNAi-sense strand
agacaaagaagcgcugauuuu

SEQ ID NO: 2586 - RNA, 21 nt, RNAi-antisense strand
aaucagcgcuucuuugucuuu

SEQ ID NO: 2587 - DNA, 21 bp, Homo sapiens
gacaaagaagcgctgattgca

SEQ ID NO: 2588 - RNA, 21 nt, RNAi-sense strand
caaagaagcgcugauugcauu

SEQ ID NO: 2589 - RNA, 21 nt, RNAi-antisense strand
ugcaaucagcgcuucuuuguu

SEQ ID NO: 2590 - DNA, 21 bp, Homo sapiens
gattatcgaaggcgattactc

SEQ ID NO: 2591 - RNA, 21 nt, RNAi-sense strand
uuaucgaaggcgauuacucuu

SEQ ID NO: 2592 - RNA, 21 nt, RNAi-antisense strand
gaguaaucgccuucgauaauu

SEQ ID NO: 2593 - DNA, 21 bp, Homo sapiens
gaaggcgattactcagtgtta

SEQ ID NO: 2594 - RNA, 21 nt, RNAi-sense strand
aggcgauuacucaguguuauu

SEQ ID NO: 2595 - RNA, 21 nt, RNAi-antisense strand
uaacacugaguaaucgccuuu

SEQ ID NO: 2596 - DNA, 21 bp, Homo sapiens
gagctgtcagtttgtagccgt

SEQ ID NO: 2597 - RNA, 21 nt, RNAi-sense strand
gcugucaguuuguagccguuu

SEQ ID NO: 2598 - RNA, 21 nt, RNAi-antisense strand
acggcuacaaacugacagcuu

SEQ ID NO: 2599 - DNA, 21 bp, Homo sapiens
gaagaccttaagactcatatg

SEQ ID NO: 2600 - RNA, 21 nt, RNAi-sense strand
agaccuuaagacucauauguu

SEQ ID NO: 2601 - RNA, 21 nt, RNAi-antisense strand
cauaugagucuuaaggucuuu

SEQ ID NO: 2602 - DNA, 21 bp, Homo sapiens
gaccttaagactcatatggtt

SEQ ID NO: 2603 - RNA, 21 nt, RNAi-sense strand
ccuuaagacucauaugguuuu

SEQ ID NO: 2604 - RNA, 21 nt, RNAi-antisense strand
aaccauaugagucuuaagguu

SEQ ID NO: 2605 - DNA, 21 bp, Homo sapiens
tacttagttggaaactccttg

SEQ ID NO: 2606 - RNA, 21 nt, RNAi-sense strand
cuuaguuggaaacuccuuguu

SEQ ID NO: 2607 - RNA, 21 nt, RNAi-antisense strand
caaggaguuuccaacuaaguu

SEQ ID NO: 2608 - DNA, 21 bp, Homo sapiens
taccgtcagatttcctccaga

SEQ ID NO: 2609 - RNA, 21 nt, RNAi-sense strand
ccgucagauuuccuccagauu

SEQ ID NO: 2610 - RNA, 21 nt, RNAi-antisense strand
ucuggaggaaaucugacgguu

SEQ ID NO: 2611 - DNA, 21 bp, Homo sapiens
tagttgacagcatcgaaggtg

SEQ ID NO: 2612 - RNA, 21 nt, RNAi-sense strand
guugacagcaucgaagguguu

SEQ ID NO: 2613 - RNA, 21 nt, RNAi-antisense strand
caccuucgaugcugucaacuu

SEQ ID NO: 2614 - DNA, 21 bp, Homo sapiens
tatagtcggctaaatctcaac

SEQ ID NO: 2615 - RNA, 21 nt, RNAi-sense strand
uagucggcuaaaucucaacuu

SEQ ID NO: 2616 - RNA, 21 nt, RNAi-antisense strand
guugagauuuagccgacuauu

SEQ ID NO: 2617 - DNA, 21 bp, Homo sapiens
taaatctcaacaacacagtgc

SEQ ID NO: 2618 - RNA, 21 nt, RNAi-sense strand
aaucucaacaacacagugcuu

SEQ ID NO: 2619 - RNA, 21 nt, RNAi-antisense strand
gcacuguguuguugagauuuu

SEQ ID NO: 2620 - DNA, 21 bp, Homo sapiens
taattgtactacatctgagga

SEQ ID NO: 2621 - RNA, 21 nt, RNAi-sense strand
auuguacuacaucugaggauu

SEQ ID NO: 2622 - RNA, 21 nt, RNAi-antisense strand
uccucagauguaguacaauuu

SEQ ID NO: 2623 - DNA, 21 bp, Homo sapiens
tacaatagagtggctgttcaa

SEQ ID NO: 2624 - RNA, 21 nt, RNAi-sense strand
caauagaguggcuguucaauu

SEQ ID NO: 2625 - RNA, 21 nt, RNAi-antisense strand
uugaacagccacucuauuguu

SEQ ID NO: 2626 - DNA, 21 bp, Homo sapiens
tatctcaaagttcggattcaa

SEQ ID NO: 2627 - RNA, 21 nt, RNAi-sense strand
ucucaaaguucggauucaauu

SEQ ID NO: 2628 - RNA, 21 nt, RNAi-antisense strand
uugaauccgaacuuugagauu

SEQ ID NO: 2629 - DNA, 21 bp, Homo sapiens
tacaagtctttgataggagta

SEQ ID NO: 2630 - RNA, 21 nt, RNAi-sense strand
caagucuuugauaggaguauu

SEQ ID NO: 2631 - RNA, 21 nt, RNAi-antisense strand
uacuccuaucaaagacuuguu

SEQ ID NO: 2632 - DNA, 21 bp, Homo sapiens
taggagtagagtataagcctg

SEQ ID NO: 2633 - RNA, 21 nt, RNAi-sense strand
ggaguagaguauaagccuguu

SEQ ID NO: 2634 - RNA, 21 nt, RNAi-antisense strand
caggcuuauacucuacuccuu

SEQ ID NO: 2635 - DNA, 21 bp, Homo sapiens
tacaatcacacagagacctgc

SEQ ID NO: 2636 - RNA, 21 nt, RNAi-sense strand
caaucacacagagaccugcuu

SEQ ID NO: 2637 - RNA, 21 nt, RNAi-antisense strand
gcaggucucugugugauuguu

SEQ ID NO: 2638 - DNA, 21 bp, Homo sapiens
tacttgacttatatgctcagg

SEQ ID NO: 2639 - RNA, 21 nt, RNAi-sense strand
cuugacuuauaugcucagguu

SEQ ID NO: 2640 - RNA, 21 nt, RNAi-antisense strand
ccugagcauauaagucaaguu

SEQ ID NO: 2641 - DNA, 21 bp, Homo sapiens
tatatgctcaggtatatgaag

SEQ ID NO: 2642 - RNA, 21 nt, RNAi-sense strand
uaugcucagguauaugaaguu

SEQ ID NO: 2643 - RNA, 21 nt, RNAi-antisense strand
cuucauauaccugagcauauu

SEQ ID NO: 2644 - DNA, 21 bp, Homo sapiens
tatatgaagaactcctggcaa

SEQ ID NO: 2645 - RNA, 21 nt, RNAi-sense strand
uaugaagaacuccuggcaauu

SEQ ID NO: 2646 - RNA, 21 nt, RNAi-antisense strand
uugccaggaguucuucauauu

SEQ ID NO: 2647 - DNA, 21 bp, Homo sapiens
tatgaagaactcctggcaatt

SEQ ID NO: 2648 - RNA, 21 nt, RNAi-sense strand
ugaagaacuccuggcaauuuu

SEQ ID NO: 2649 - RNA, 21 nt, RNAi-antisense strand
aauugccaggaguucuucauu

SEQ ID NO: 2650 - DNA, 21 bp, Homo sapiens
tatatctgctagtggaagagc

SEQ ID NO: 2651 - RNA, 21 nt, RNAi-sense strand
uaucugcuaguggaagagcuu

SEQ ID NO: 2652 - RNA, 21 nt, RNAi-antisense strand
gcucuuccacuagcagauauu

SEQ ID NO: 2653 - DNA, 21 bp, Homo sapiens
tatctgctagtggaagagcta

SEQ ID NO: 2654 - RNA, 21 nt, RNAi-sense strand
ucugcuaguggaagagcuauu

SEQ ID NO: 2655 - RNA, 21 nt, RNAi-antisense strand
uagcucuuccacuagcagauu

SEQ ID NO: 2656 - DNA, 21 bp, Homo sapiens
tatcgaaggcgattactcagt

SEQ ID NO: 2657 - RNA, 21 nt, RNAi-sense strand
ucgaaggcgauuacucaguuu

SEQ ID NO: 2658 - RNA, 21 nt, RNAi-antisense strand
acugaguaaucgccuucgauu

SEQ ID NO: 2659 - DNA, 21 bp, Homo sapiens
taacatccgcgttagagctga

SEQ ID NO: 2660 - RNA, 21 nt, RNAi-sense strand
acauccgcguuagagcugauu

SEQ ID NO: 2661 - RNA, 21 nt, RNAi-antisense strand
ucagcucuaacgcggauguuu

SEQ ID NO: 2662 - DNA, 21 bp, Homo sapiens
tagagctgatttacgagataa

SEQ ID NO: 2663 - RNA, 21 nt, RNAi-sense strand
gagcugauuuacgagauaauu

SEQ ID NO: 2664 - RNA, 21 nt, RNAi-antisense strand
uuaucucguaaaucagcucuu

SEQ ID NO: 2665 - DNA, 21 bp, Homo sapiens
taagactcatatggttgtggc

SEQ ID NO: 2666 - RNA, 21 nt, RNAi-sense strand
agacucauaugguuguggcuu

SEQ ID NO: 2667 - RNA, 21 nt, RNAi-antisense strand
gccacaaccauaugagucuuu

SEQ ID NO: 2668 - DNA, 21 bp, Homo sapiens
tatggttgtggctaatacaat

SEQ ID NO: 2669 - RNA, 21 nt, RNAi-sense strand
ugguuguggcuaauacaauuu

SEQ ID NO: 2670 - RNA, 21 nt, RNAi-antisense strand
auuguauuagccacaaccauu

SEQ ID NO: 2671 - DNA, 21 bp, Homo sapiens
aacgcctacatcgacaacctc

SEQ ID NO: 2672 - RNA, 21 nt, RNAi-sense strand
cgccuacaucgacaaccucuu

SEQ ID NO: 2673 - RNA, 21 nt, RNAi-antisense strand
gagguugucgauguaggcguu

SEQ ID NO: 2674 - DNA, 21 bp, Homo sapiens
aaacgttcgtcaacatcacgc

SEQ ID NO: 2675 - RNA, 21 nt, RNAi-sense strand
acguucgucaacaucacgcuu

SEQ ID NO: 2676 - RNA, 21 nt, RNAi-antisense strand
gcgugauguugacgaacguuu

SEQ ID NO: 2677 - DNA, 21 bp, Homo sapiens
aacgttcgtcaacatcacgcc

SEQ ID NO: 2678 - RNA, 21 nt, RNAi-sense strand
cguucgucaacaucacgccuu

SEQ ID NO: 2679 - RNA, 21 nt, RNAi-antisense strand
ggcgugauguugacgaacguu

SEQ ID NO: 2680 - DNA, 21 bp, Homo sapiens
aacatcacgccagctgaggtg

SEQ ID NO: 2681 - RNA, 21 nt, RNAi-sense strand
caucacgccagcugagguguu

SEQ ID NO: 2682 - RNA, 21 nt, RNAi-antisense strand
caccucagcuggcgugauguu

SEQ ID NO: 2683 - DNA, 21 bp, Homo sapiens
aatttagcatggatcttcgta

SEQ ID NO: 2684 - RNA, 21 nt, RNAi-sense strand
uuuagcauggaucuucguauu

SEQ ID NO: 2685 - RNA, 21 nt, RNAi-antisense strand
uacgaagauccaugcuaaauu

SEQ ID NO: 2686 - DNA, 21 bp, Homo sapiens
aatgtcactgtcaccaagact

SEQ ID NO: 2687 - RNA, 21 nt, RNAi-sense strand
ugucacugucaccaagacuuu

SEQ ID NO: 2688 - RNA, 21 nt, RNAi-antisense strand
agucuuggugacagugacauu

SEQ ID NO: 2689 - DNA, 21 bp, Homo sapiens
aagactgacaagacgctagtc

SEQ ID NO: 2690 - RNA, 21 nt, RNAi-sense strand
gacugacaagacgcuagucuu

SEQ ID NO: 2691 - RNA, 21 nt, RNAi-antisense strand
gacuagcgucuugucagucuu

SEQ ID NO: 2692 - DNA, 21 bp, Homo sapiens
aagacgctagtcctgctgatg

SEQ ID NO: 2693 - RNA, 21 nt, RNAi-sense strand
gacgcuaguccugcugauguu

SEQ ID NO: 2694 - RNA, 21 nt, RNAi-antisense strand
caucagcaggacuagcgucuu

SEQ ID NO: 2695 - DNA, 21 bp, Homo sapiens
aaagaaggtgtccacggtggt

SEQ ID NO: 2696 - RNA, 21 nt, RNAi-sense strand
agaagguguccacggugguuu

SEQ ID NO: 2697 - RNA, 21 nt, RNAi-antisense strand
accaccguggacaccuucuuu

SEQ ID NO: 2698 - DNA, 21 bp, Homo sapiens
aagaaggtgtccacggtggtt

SEQ ID NO: 2699 - RNA, 21 nt, RNAi-sense strand
gaagguguccacggugguuuu

SEQ ID NO: 2700 - RNA, 21 nt, RNAi-antisense strand
aaccaccguggacaccuucuu

SEQ ID NO: 2701 - DNA, 21 bp, Homo sapiens
aaggtgtccacggtggtttga

SEQ ID NO: 2702 - RNA, 21 nt, RNAi-sense strand
gguguccacggugguuugauu

SEQ ID NO: 2703 - RNA, 21 nt, RNAi-antisense strand
ucaaaccaccguggacaccuu

SEQ ID NO: 2704 - DNA, 21 bp, Homo sapiens
aagaaatgttatgaaatggcc

SEQ ID NO: 2705 - RNA, 21 nt, RNAi-sense strand
gaaauguuaugaaauggccuu

SEQ ID NO: 2706 - RNA, 21 nt, RNAi-antisense strand
ggccauuucauaacauuucuu

SEQ ID NO: 2707 - DNA, 21 bp, Homo sapiens
aaatgttatgaaatggcctcc

SEQ ID NO: 2708 - RNA, 21 nt, RNAi-sense strand
auguuaugaaauggccuccuu

SEQ ID NO: 2709 - RNA, 21 nt, RNAi-antisense strand
ggaggccauuucauaacauuu

SEQ ID NO: 2710 - DNA, 21 bp, Homo sapiens
catcgacaacctcatggcgga

SEQ ID NO: 2711 - RNA, 21 nt, RNAi-sense strand
ucgacaaccucauggcggauu

SEQ ID NO: 2712 - RNA, 21 nt, RNAi-antisense strand
uccgccaugagguugucgauu

SEQ ID NO: 2713 - DNA, 21 bp, Homo sapiens
caacatcacgccagctgaggt

SEQ ID NO: 2714 - RNA, 21 nt, RNAi-sense strand
acaucacgccagcugagguuu

SEQ ID NO: 2715 - RNA, 21 nt, RNAi-antisense strand
accucagcuggcgugauguuu

SEQ ID NO: 2716 - DNA, 21 bp, Homo sapiens
cagaaatgttcggtgatccgg

SEQ ID NO: 2717 - RNA, 21 nt, RNAi-sense strand
gaaauguucggugauccgguu

SEQ ID NO: 2718 - RNA, 21 nt, RNAi-antisense strand
ccggaucaccgaacauuucuu

SEQ ID NO: 2719 - DNA, 21 bp, Homo sapiens
catggatcttcgtaccaagag

SEQ ID NO: 2720 - RNA, 21 nt, RNAi-sense strand
uggaucuucguaccaagaguu

SEQ ID NO: 2721 - RNA, 21 nt, RNAi-antisense strand
cucuugguacgaagauccauu

SEQ ID NO: 2722 - DNA, 21 bp, Homo sapiens
caccttcaatgtcactgtcac

SEQ ID NO: 2723 - RNA, 21 nt, RNAi-sense strand
ccuucaaugucacugucacuu

SEQ ID NO: 2724 - RNA, 21 nt, RNAi-antisense strand
gugacagugacauugaagguu

SEQ ID NO: 2725 - DNA, 21 bp, Homo sapiens
caatgtcactgtcaccaagac

SEQ ID NO: 2726 - RNA, 21 nt, RNAi-sense strand
augucacugucaccaagacuu

SEQ ID NO: 2727 - RNA, 21 nt, RNAi-antisense strand
gucuuggugacagugacauuu

SEQ ID NO: 2728 - DNA, 21 bp, Homo sapiens
cactgtcaccaagactgacaa

SEQ ID NO: 2729 - RNA, 21 nt, RNAi-sense strand
cugucaccaagacugacaauu

SEQ ID NO: 2730 - RNA, 21 nt, RNAi-antisense strand
uugucagucuuggugacaguu

SEQ ID NO: 2731 - DNA, 21 bp, Homo sapiens
caccaagactgacaagacgct

SEQ ID NO: 2732 - RNA, 21 nt, RNAi-sense strand
ccaagacugacaagacgcuuu

SEQ ID NO: 2733 - RNA, 21 nt, RNAi-antisense strand
agcgucuugucagucuugguu

SEQ ID NO: 2734 - DNA, 21 bp, Homo sapiens
caagactgacaagacgctagt

SEQ ID NO: 2735 - RNA, 21 nt, RNAi-sense strand
agacugacaagacgcuaguuu

SEQ ID NO: 2736 - RNA, 21 nt, RNAi-antisense strand
acuagcgucuugucagucuuu

SEQ ID NO: 2737 - DNA, 21 bp, Homo sapiens
caagacgctagtcctgctgat

SEQ ID NO: 2738 - RNA, 21 nt, RNAi-sense strand
agacgcuaguccugcugauuu

SEQ ID NO: 2739 - RNA, 21 nt, RNAi-antisense strand
aucagcaggacuagcgucuuu

SEQ ID NO: 2740 - DNA, 21 bp, Homo sapiens
caaagaaggtgtccacggtgg

SEQ ID NO: 2741 - RNA, 21 nt, RNAi-sense strand
aagaagguguccacggugguu

SEQ ID NO: 2742 - RNA, 21 nt, RNAi-antisense strand
ccaccguggacaccuucuuuu

SEQ ID NO: 2743 - DNA, 21 bp, Homo sapiens
cacggtggtttgatcaacaag

SEQ ID NO: 2744 - RNA, 21 nt, RNAi-sense strand
cggugguuugaucaacaaguu

SEQ ID NO: 2745 - RNA, 21 nt, RNAi-antisense strand
cuuguugaucaaaccaccguu

SEQ ID NO: 2746 - DNA, 21 bp, Homo sapiens
caagaaatgttatgaaatggc

SEQ ID NO: 2747 - RNA, 21 nt, RNAi-sense strand
agaaauguuaugaaauggcuu

SEQ ID NO: 2748 - RNA, 21 nt, RNAi-antisense strand
gccauuucauaacauuucuuu

SEQ ID NO: 2749 - DNA, 21 bp, Homo sapiens
cagtactgacctcgtctgtcc

SEQ ID NO: 2750 - RNA, 21 nt, RNAi-sense strand
guacugaccucgucuguccuu

SEQ ID NO: 2751 - RNA, 21 nt, RNAi-antisense strand
ggacagacgaggucaguacuu

SEQ ID NO: 2752 - DNA, 21 bp, Homo sapiens
gaacgcctacatcgacaacct

SEQ ID NO: 2753 - RNA, 21 nt, RNAi-sense strand
acgccuacaucgacaaccuuu

SEQ ID NO: 2754 - RNA, 21 nt, RNAi-antisense strand
agguugucgauguaggcguuu

SEQ ID NO: 2755 - DNA, 21 bp, Homo sapiens
gaatttagcatggatcttcgt

SEQ ID NO: 2756 - RNA, 21 nt, RNAi-sense strand
auuuagcauggaucuucguuu

SEQ ID NO: 2757 - RNA, 21 nt, RNAi-antisense strand
acgaagauccaugcuaaauuu

SEQ ID NO: 2758 - DNA, 21 bp, Homo sapiens
gatcttcgtaccaagagcacc

SEQ ID NO: 2759 - RNA, 21 nt, RNAi-sense strand
ucuucguaccaagagcaccuu

SEQ ID NO: 2760 - RNA, 21 nt, RNAi-antisense strand
ggugcucuugguacgaagauu

SEQ ID NO: 2761 - DNA, 21 bp, Homo sapiens
gactgacaagacgctagtcct

SEQ ID NO: 2762 - RNA, 21 nt, RNAi-sense strand
cugacaagacgcuaguccuuu

SEQ ID NO: 2763 - RNA, 21 nt, RNAi-antisense strand
aggacuagcgucuugucaguu

SEQ ID NO: 2764 - DNA, 21 bp, Homo sapiens
gacaagacgctagtcctgctg

SEQ ID NO: 2765 - RNA, 21 nt, RNAi-sense strand
caagacgcuaguccugcuguu

SEQ ID NO: 2766 - RNA, 21 nt, RNAi-antisense strand
cagcaggacuagcgucuuguu

SEQ ID NO: 2767 - DNA, 21 bp, Homo sapiens
gaaggtgtccacggtggtttg

SEQ ID NO: 2768 - RNA, 21 nt, RNAi-sense strand
agguguccacggugguuuguu

SEQ ID NO: 2769 - RNA, 21 nt, RNAi-antisense strand
caaaccaccguggacaccuuu

SEQ ID NO: 2770 - DNA, 21 bp, Homo sapiens
gaaatgttatgaaatggcctc

SEQ ID NO: 2771 - RNA, 21 nt, RNAi-sense strand
aauguuaugaaauggccucuu

SEQ ID NO: 2772 - RNA, 21 nt, RNAi-antisense strand
gaggccauuucauaacauuuu

SEQ ID NO: 2773 - DNA, 21 bp, Homo sapiens
tacatcgacaacctcatggcg

SEQ ID NO: 2774 - RNA, 21 nt, RNAi-sense strand
caucgacaaccucauggcguu

SEQ ID NO: 2775 - RNA, 21 nt, RNAi-antisense strand
cgccaugagguugucgauguu

SEQ ID NO: 2776 - DNA, 21 bp, Homo sapiens
tagcatggatcttcgtaccaa

SEQ ID NO: 2777 - RNA, 21 nt, RNAi-sense strand
gcauggaucuucguaccaauu

SEQ ID NO: 2778 - RNA, 21 nt, RNAi-antisense strand
uugguacgaagauccaugcuu

SEQ ID NO: 2779 - DNA, 21 bp, Homo sapiens
aagctagttcttctggagctc

SEQ ID NO: 2780 - RNA, 21 nt, RNAi-sense strand
gcuaguucuucuggagcucuu

SEQ ID NO: 2781 - RNA, 21 nt, RNAi-antisense strand
gagcuccagaagaacuagcuu

SEQ ID NO: 2782 - DNA, 21 bp, Homo sapiens
aagctgaccaaacagcagcta

SEQ ID NO: 2783 - RNA, 21 nt, RNAi-sense strand
gcugaccaaacagcagcuauu

SEQ ID NO: 2784 - RNA, 21 nt, RNAi-antisense strand
uagcugcuguuuggucagcuu

SEQ ID NO: 2785 - DNA, 21 bp, Homo sapiens
aaacagcagctaattctggcc

SEQ ID NO: 2786 - RNA, 21 nt, RNAi-sense strand
acagcagcuaauucuggccuu

SEQ ID NO: 2787 - RNA, 21 nt, RNAi-antisense strand
ggccagaauuagcugcuguuu

SEQ ID NO: 2788 - DNA, 21 bp, Homo sapiens
aatggagcatcctacgcaagg

SEQ ID NO: 2789 - RNA, 21 nt, RNAi-sense strand
uggagcauccuacgcaagguu

SEQ ID NO: 2790 - RNA, 21 nt, RNAi-antisense strand
ccuugcguaggaugcuccauu

SEQ ID NO: 2791 - DNA, 21 bp, Homo sapiens
aacctcctcttcctgctgtcc

SEQ ID NO: 2792 - RNA, 21 nt, RNAi-sense strand
ccuccucuuccugcuguccuu

SEQ ID NO: 2793 - RNA, 21 nt, RNAi-antisense strand
ggacagcaggaagaggagguu

SEQ ID NO: 2794 - DNA, 21 bp, Homo sapiens
aaggacatacagaccaatgtc

SEQ ID NO: 2795 - RNA, 21 nt, RNAi-sense strand
ggacauacagaccaaugucuu

SEQ ID NO: 2796 - RNA, 21 nt, RNAi-antisense strand
gacauuggucuguauguccuu

SEQ ID NO: 2797 - DNA, 21 bp, Homo sapiens
aacaaagtgttcctggccaag

SEQ ID NO: 2798 - RNA, 21 nt, RNAi-sense strand
caaaguguuccuggccaaguu

SEQ ID NO: 2799 - RNA, 21 nt, RNAi-antisense strand
cuuggccaggaacacuuuguu

SEQ ID NO: 2800 - DNA, 21 bp, Homo sapiens
aaagatgacagactacgccaa

SEQ ID NO: 2801 - RNA, 21 nt, RNAi-sense strand
agaugacagacuacgccaauu

SEQ ID NO: 2802 - RNA, 21 nt, RNAi-antisense strand
uuggcguagucugucaucuuu

SEQ ID NO: 2803 - DNA, 21 bp, Homo sapiens
aagatgacagactacgccaag

SEQ ID NO: 2804 - RNA, 21 nt, RNAi-sense strand
gaugacagacuacgccaaguu

SEQ ID NO: 2805 - RNA, 21 nt, RNAi-antisense strand
cuuggcguagucugucaucuu

SEQ ID NO: 2806 - DNA, 21 bp, Homo sapiens
aagccggaagacaccaccatt

SEQ ID NO: 2807 - RNA, 21 nt, RNAi-sense strand
gccggaagacaccaccauuuu

SEQ ID NO: 2808 - RNA, 21 nt, RNAi-antisense strand
aaugguggugucuuccggcuu

SEQ ID NO: 2809 - DNA, 21 bp, Homo sapiens
aactggccaaacaggtcatcg

SEQ ID NO: 2810 - RNA, 21 nt, RNAi-sense strand
cuggccaaacaggucaucguu

SEQ ID NO: 2811 - RNA, 21 nt, RNAi-antisense strand
cgaugaccuguuuggccaguu

SEQ ID NO: 2812 - DNA, 21 bp, Homo sapiens
aaacaggtcatcgagtatgcc

SEQ ID NO: 2813 - RNA, 21 nt, RNAi-sense strand
acaggucaucgaguaugccuu

SEQ ID NO: 2814 - RNA, 21 nt, RNAi-antisense strand
ggcauacucgaugaccuguuu

SEQ ID NO: 2815 - DNA, 21 bp, Homo sapiens
caagctagttcttctggagct

SEQ ID NO: 2816 - RNA, 21 nt, RNAi-sense strand
agcuaguucuucuggagcuuu

SEQ ID NO: 2817 - RNA, 21 nt, RNAi-antisense strand
agcuccagaagaacuagcuuu

SEQ ID NO: 2818 - DNA, 21 bp, Homo sapiens
caacttcttgccaaccacagg

SEQ ID NO: 2819 - RNA, 21 nt, RNAi-sense strand
acuucuugccaaccacagguu

SEQ ID NO: 2820 - RNA, 21 nt, RNAi-antisense strand
ccugugguuggcaagaaguuu

SEQ ID NO: 2821 - DNA, 21 bp, Homo sapiens
caagctgaccaaacagcagct

SEQ ID NO: 2822 - RNA, 21 nt, RNAi-sense strand
agcugaccaaacagcagcuuu

SEQ ID NO: 2823 - RNA, 21 nt, RNAi-antisense strand
agcugcuguuuggucagcuuu

SEQ ID NO: 2824 - DNA, 21 bp, Homo sapiens
caaacagcagctaattctggc

SEQ ID NO: 2825 - RNA, 21 nt, RNAi-sense strand
aacagcagcuaauucuggcuu

SEQ ID NO: 2826 - RNA, 21 nt, RNAi-antisense strand
gccagaauuagcugcuguuuu

SEQ ID NO: 2827 - DNA, 21 bp, Homo sapiens
caatggagcatcctacgcaag

SEQ ID NO: 2828 - RNA, 21 nt, RNAi-sense strand
auggagcauccuacgcaaguu

SEQ ID NO: 2829 - RNA, 21 nt, RNAi-antisense strand
cuugcguaggaugcuccauuu

SEQ ID NO: 2830 - DNA, 21 bp, Homo sapiens
cagctcaaatgctactacttt

SEQ ID NO: 2831 - RNA, 21 nt, RNAi-sense strand
gcucaaaugcuacuacuuuuu

SEQ ID NO: 2832 - RNA, 21 nt, RNAi-antisense strand
aaaguaguagcauuugagcuu

SEQ ID NO: 2833 - DNA, 21 bp, Homo sapiens
cagcctatatgcaccagctct

SEQ ID NO: 2834 - RNA, 21 nt, RNAi-sense strand
gccuauaugcaccagcucuuu

SEQ ID NO: 2835 - RNA, 21 nt, RNAi-antisense strand
agagcuggugcauauaggcuu

SEQ ID NO: 2836 - DNA, 21 bp, Homo sapiens
caacctcctcttcctgctgtc

SEQ ID NO: 2837 - RNA, 21 nt, RNAi-sense strand
accuccucuuccugcugucuu

SEQ ID NO: 2838 - RNA, 21 nt, RNAi-antisense strand
gacagcaggaagaggagguuu

SEQ ID NO: 2839 - DNA, 21 bp, Homo sapiens
caaggacatacagaccaatgt

SEQ ID NO: 2840 - RNA, 21 nt, RNAi-sense strand
aggacauacagaccaauguuu

SEQ ID NO: 2841 - RNA, 21 nt, RNAi-antisense strand
acauuggucuguauguccuuu

SEQ ID NO: 2842 - DNA, 21 bp, Homo sapiens
catacagaccaatgtctacat

SEQ ID NO: 2843 - RNA, 21 nt, RNAi-sense strand
uacagaccaaugucuacauuu

SEQ ID NO: 2844 - RNA, 21 nt, RNAi-antisense strand
auguagacauuggucuguauu

SEQ ID NO: 2845 - DNA, 21 bp, Homo sapiens
cagaccaatgtctacatcaag

SEQ ID NO: 2846 - RNA, 21 nt, RNAi-sense strand
gaccaaugucuacaucaaguu

SEQ ID NO: 2847 - RNA, 21 nt, RNAi-antisense strand
cuugauguagacauuggucuu

SEQ ID NO: 2848 - DNA, 21 bp, Homo sapiens
cagctacaacaaagtgttcct

SEQ ID NO: 2849 - RNA, 21 nt, RNAi-sense strand
gcuacaacaaaguguuccuuu

SEQ ID NO: 2850 - RNA, 21 nt, RNAi-antisense strand
aggaacacuuuguuguagcuu

SEQ ID NO: 2851 - DNA, 21 bp, Homo sapiens
caacaaagtgttcctggccaa

SEQ ID NO: 2852 - RNA, 21 nt, RNAi-sense strand
acaaaguguuccuggccaauu

SEQ ID NO: 2853 - RNA, 21 nt, RNAi-antisense strand
uuggccaggaacacuuuguuu

SEQ ID NO: 2854 - DNA, 21 bp, Homo sapiens
caccttcttcattgacatcct

SEQ ID NO: 2855 - RNA, 21 nt, RNAi-sense strand
ccuucuucauugacauccuuu

SEQ ID NO: 2856 - RNA, 21 nt, RNAi-antisense strand
aggaugucaaugaagaagguu

SEQ ID NO: 2857 - DNA, 21 bp, Homo sapiens
cattgacatcctgctcgacac

SEQ ID NO: 2858 - RNA, 21 nt, RNAi-sense strand
uugacauccugcucgacacuu

SEQ ID NO: 2859 - RNA, 21 nt, RNAi-antisense strand
gugucgagcaggaugucaauu

SEQ ID NO: 2860 - DNA, 21 bp, Homo sapiens
catcctgctcgacactatcag

SEQ ID NO: 2861 - RNA, 21 nt, RNAi-sense strand
uccugcucgacacuaucaguu

SEQ ID NO: 2862 - RNA, 21 nt, RNAi-antisense strand
cugauagugucgagcaggauu

SEQ ID NO: 2863 - DNA, 21 bp, Homo sapiens
catcgagaaggcctacgagaa

SEQ ID NO: 2864 - RNA, 21 nt, RNAi-sense strand
ucgagaaggccuacgagaauu

SEQ ID NO: 2865 - RNA, 21 nt, RNAi-antisense strand
uucucguaggccuucucgauu

SEQ ID NO: 2866 - DNA, 21 bp, Homo sapiens
cagactacgccaagaagcgag

SEQ ID NO: 2867 - RNA, 21 nt, RNAi-sense strand
gacuacgccaagaagcgaguu

SEQ ID NO: 2868 - RNA, 21 nt, RNAi-antisense strand
cucgcuucuuggcguagucuu

SEQ ID NO: 2869 - DNA, 21 bp, Homo sapiens
cagcagcagaagccggaagac

SEQ ID NO: 2870 - RNA, 21 nt, RNAi-sense strand
gcagcagaagccggaagacuu

SEQ ID NO: 2871 - RNA, 21 nt, RNAi-antisense strand
gucuuccggcuucugcugcuu

SEQ ID NO: 2872 - DNA, 21 bp, Homo sapiens
cagcagaagccggaagacacc

SEQ ID NO: 2873 - RNA, 21 nt, RNAi-sense strand
gcagaagccggaagacaccuu

SEQ ID NO: 2874 - RNA, 21 nt, RNAi-antisense strand
ggugucuuccggcuucugcuu

SEQ ID NO: 2875 - DNA, 21 bp, Homo sapiens
cagaagccggaagacaccacc

SEQ ID NO: 2876 - RNA, 21 nt, RNAi-sense strand
gaagccggaagacaccaccuu

SEQ ID NO: 2877 - RNA, 21 nt, RNAi-antisense strand
gguggugucuuccggcuucuu

SEQ ID NO: 2878 - DNA, 21 bp, Homo sapiens
cacagaactggccaaacaggt

SEQ ID NO: 2879 - RNA, 21 nt, RNAi-sense strand
cagaacuggccaaacagguuu

SEQ ID NO: 2880 - RNA, 21 nt, RNAi-antisense strand
accuguuuggccaguucuguu

SEQ ID NO: 2881 - DNA, 21 bp, Homo sapiens
cagaactggccaaacaggtca

SEQ ID NO: 2882 - RNA, 21 nt, RNAi-sense strand
gaacuggccaaacaggucauu

SEQ ID NO: 2883 - RNA, 21 nt, RNAi-antisense strand
ugaccuguuuggccaguucuu

SEQ ID NO: 2884 - DNA, 21 bp, Homo sapiens
caaacaggtcatcgagtatgc

SEQ ID NO: 2885 - RNA, 21 nt, RNAi-sense strand
aacaggucaucgaguaugcuu

SEQ ID NO: 2886 - RNA, 21 nt, RNAi-antisense strand
gcauacucgaugaccuguuuu

SEQ ID NO: 2887 - DNA, 21 bp, Homo sapiens
cagctggagatgatcgtctga

SEQ ID NO: 2888 - RNA, 21 nt, RNAi-sense strand
gcuggagaugaucgucugauu

SEQ ID NO: 2889 - RNA, 21 nt, RNAi-antisense strand
ucagacgaucaucuccagcuu

SEQ ID NO: 2890 - DNA, 21 bp, Homo sapiens
gaccggcatgtacgagcaact

SEQ ID NO: 2891 - RNA, 21 nt, RNAi-sense strand
ccggcauguacgagcaacuuu

SEQ ID NO: 2892 - RNA, 21 nt, RNAi-antisense strand
aguugcucguacaugccgguu

SEQ ID NO: 2893 - DNA, 21 bp, Homo sapiens
gactcaagctagttcttctgg

SEQ ID NO: 2894 - RNA, 21 nt, RNAi-sense strand
cucaagcuaguucuucugguu

SEQ ID NO: 2895 - RNA, 21 nt, RNAi-antisense strand
ccagaagaacuagcuugaguu

SEQ ID NO: 2896 - DNA, 21 bp, Homo sapiens
gagctcaacttcttgccaacc

SEQ ID NO: 2897 - RNA, 21 nt, RNAi-sense strand
gcucaacuucuugccaaccuu

SEQ ID NO: 2898 - RNA, 21 nt, RNAi-antisense strand
gguuggcaagaaguugagcuu

SEQ ID NO: 2899 - DNA, 21 bp, Homo sapiens
gaccaagctgaccaaacagca

SEQ ID NO: 2900 - RNA, 21 nt, RNAi-sense strand
ccaagcugaccaaacagcauu

SEQ ID NO: 2901 - RNA, 21 nt, RNAi-antisense strand
ugcuguuuggucagcuugguu

SEQ ID NO: 2902 - DNA, 21 bp, Homo sapiens
gaccaaacagcagctaattct

SEQ ID NO: 2903 - RNA, 21 nt, RNAi-sense strand
ccaaacagcagcuaauucuuu

SEQ ID NO: 2904 - RNA, 21 nt, RNAi-antisense strand
agaauuagcugcuguuugguu

SEQ ID NO: 2905 - DNA, 21 bp, Homo sapiens
gagcatcctacgcaaggacat

SEQ ID NO: 2906 - RNA, 21 nt, RNAi-sense strand
gcauccuacgcaaggacauuu

SEQ ID NO: 2907 - RNA, 21 nt, RNAi-antisense strand
auguccuugcguaggaugcuu

SEQ ID NO: 2908 - DNA, 21 bp, Homo sapiens
gagtcagcctatatgcaccag

SEQ ID NO: 2909 - RNA, 21 nt, RNAi-sense strand
gucagccuauaugcaccaguu

SEQ ID NO: 2910 - RNA, 21 nt, RNAi-antisense strand
cuggugcauauaggcugacuu

SEQ ID NO: 2911 - DNA, 21 bp, Homo sapiens
gagttccacacggagttggag

SEQ ID NO: 2912 - RNA, 21 nt, RNAi-sense strand
guuccacacggaguuggaguu

SEQ ID NO: 2913 - RNA, 21 nt, RNAi-antisense strand
cuccaacuccguguggaacuu

SEQ ID NO: 2914 - DNA, 21 bp, Homo sapiens
gacatacagaccaatgtctac

SEQ ID NO: 2915 - RNA, 21 nt, RNAi-sense strand
cauacagaccaaugucuacuu

SEQ ID NO: 2916 - RNA, 21 nt, RNAi-antisense strand
guagacauuggucuguauguu

SEQ ID NO: 2917 - DNA, 21 bp, Homo sapiens
gaccaatgtctacatcaagca

SEQ ID NO: 2918 - RNA, 21 nt, RNAi-sense strand
ccaaugucuacaucaagcauu

SEQ ID NO: 2919 - RNA, 21 nt, RNAi-antisense strand
ugcuugauguagacauugguu

SEQ ID NO: 2920 - DNA, 21 bp, Homo sapiens
gagagctacaccttcttcatt

SEQ ID NO: 2921 - RNA, 21 nt, RNAi-sense strand
gagcuacaccuucuucauuuu

SEQ ID NO: 2922 - RNA, 21 nt, RNAi-antisense strand
aaugaagaagguguagcucuu

SEQ ID NO: 2923 - DNA, 21 bp, Homo sapiens
gagctacaccttcttcattga

SEQ ID NO: 2924 - RNA, 21 nt, RNAi-sense strand
gcuacaccuucuucauugauu

SEQ ID NO: 2925 - RNA, 21 nt, RNAi-antisense strand
ucaaugaagaagguguagcuu

SEQ ID NO: 2926 - DNA, 21 bp, Homo sapiens
gacatcctgctcgacactatc

SEQ ID NO: 2927 - RNA, 21 nt, RNAi-sense strand
cauccugcucgacacuaucuu

SEQ ID NO: 2928 - RNA, 21 nt, RNAi-antisense strand
gauagugucgagcaggauguu

SEQ ID NO: 2929 - DNA, 21 bp, Homo sapiens
gatcctcttcttcaacacacc

SEQ ID NO: 2930 - RNA, 21 nt, RNAi-sense strand
uccucuucuucaacacaccuu

SEQ ID NO: 2931 - RNA, 21 nt, RNAi-antisense strand
gguguguugaagaagaggauu

SEQ ID NO: 2932 - DNA, 21 bp, Homo sapiens
gatgacagactacgccaagaa

SEQ ID NO: 2933 - RNA, 21 nt, RNAi-sense strand
ugacagacuacgccaagaauu

SEQ ID NO: 2934 - RNA, 21 nt, RNAi-antisense strand
uucuuggcguagucugucauu

SEQ ID NO: 2935 - DNA, 21 bp, Homo sapiens
gacagactacgccaagaagcg

SEQ ID NO: 2936 - RNA, 21 nt, RNAi-sense strand
cagacuacgccaagaagcguu

SEQ ID NO: 2937 - RNA, 21 nt, RNAi-antisense strand
cgcuucuuggcguagucuguu

SEQ ID NO: 2938 - DNA, 21 bp, Homo sapiens
gaagccggaagacaccaccat

SEQ ID NO: 2939 - RNA, 21 nt, RNAi-sense strand
agccggaagacaccaccauuu

SEQ ID NO: 2940 - RNA, 21 nt, RNAi-antisense strand
augguggugucuuccggcuuu

SEQ ID NO: 2941 - DNA, 21 bp, Homo sapiens
gaactggccaaacaggtcatc

SEQ ID NO: 2942 - RNA, 21 nt, RNAi-sense strand
acuggccaaacaggucaucuu

SEQ ID NO: 2943 - RNA, 21 nt, RNAi-antisense strand
gaugaccuguuuggccaguuu

SEQ ID NO: 2944 - DNA, 21 bp, Homo sapiens
tagttcttctggagctcaact

SEQ ID NO: 2945 - RNA, 21 nt, RNAi-sense strand
guucuucuggagcucaacuuu

SEQ ID NO: 2946 - RNA, 21 nt, RNAi-antisense strand
aguugagcuccagaagaacuu

SEQ ID NO: 2947 - DNA, 21 bp, Homo sapiens
tactactttgattacaaggag

SEQ ID NO: 2948 - RNA, 21 nt, RNAi-sense strand
cuacuuugauuacaaggaguu

SEQ ID NO: 2949 - RNA, 21 nt, RNAi-antisense strand
cuccuuguaaucaaaguaguu

SEQ ID NO: 2950 - DNA, 21 bp, Homo sapiens
tactttgattacaaggagcag

SEQ ID NO: 2951 - RNA, 21 nt, RNAi-sense strand
cuuugauuacaaggagcaguu

SEQ ID NO: 2952 - RNA, 21 nt, RNAi-antisense strand
cugcuccuuguaaucaaaguu

SEQ ID NO: 2953 - DNA, 21 bp, Homo sapiens
tacagaccaatgtctacatca

SEQ ID NO: 2954 - RNA, 21 nt, RNAi-sense strand
cagaccaaugucuacaucauu

SEQ ID NO: 2955 - RNA, 21 nt, RNAi-antisense strand
ugauguagacauuggucuguu

SEQ ID NO: 2956 - DNA, 21 bp, Homo sapiens
tacaacaaagtgttcctggcc

SEQ ID NO: 2957 - RNA, 21 nt, RNAi-sense strand
caacaaaguguuccuggccuu

SEQ ID NO: 2958 - RNA, 21 nt, RNAi-antisense strand
ggccaggaacacuuuguuguu

SEQ ID NO: 2959 - DNA, 21 bp, Homo sapiens
tacaccttcttcattgacatc

SEQ ID NO: 2960 - RNA, 21 nt, RNAi-sense strand
caccuucuucauugacaucuu

SEQ ID NO: 2961 - RNA, 21 nt, RNAi-antisense strand
gaugucaaugaagaagguguu

SEQ ID NO: 2962 - DNA, 21 bp, Homo sapiens
aaagatgacagactacgccaa

SEQ ID NO: 2963 - RNA, 21 nt, RNAi-sense strand
agaugacagacuacgccaauu

SEQ ID NO: 2964 - RNA, 21 nt, RNAi-antisense strand
uuggcguagucugucaucuuu

SEQ ID NO: 2965 - DNA, 21 bp, Homo sapiens
aagatgacagactacgccaag

SEQ ID NO: 2966 - RNA, 21 nt, RNAi-sense strand
gaugacagacuacgccaaguu

SEQ ID NO: 2967 - RNA, 21 nt, RNAi-antisense strand
cuuggcguagucugucaucuu

SEQ ID NO: 2968 - DNA, 21 bp, Homo sapiens
catacagaccaatgtctacat

SEQ ID NO: 2969 - RNA, 21 nt, RNAi-sense strand
uacagaccaaugucuacauuu

SEQ ID NO: 2970 - RNA, 21 nt, RNAi-antisense strand
auguagacauuggucuguauu

SEQ ID NO: 2971 - DNA, 21 bp, Homo sapiens
catcctgctcgacactatcag

SEQ ID NO: 2972 - RNA, 21 nt, RNAi-sense strand
uccugcucgacacuaucaguu

SEQ ID NO: 2973 - RNA, 21 nt, RNAi-antisense strand
cugauagugucgagcaggauu

SEQ ID NO: 2974 - DNA, 21 bp, Homo sapiens
gacatacagaccaatgtctac

SEQ ID NO: 2975 - RNA, 21 nt, RNAi-sense strand
cauacagaccaaugucuacuu

SEQ ID NO: 2976 - RNA, 21 nt, RNAi-antisense strand
guagacauuggucuguauguu

SEQ ID NO: 2977 - DNA, 21 bp, Homo sapiens
gatgacagactacgccaagaa

SEQ ID NO: 2978 - RNA, 21 nt, RNAi-sense strand
ugacagacuacgccaagaauu

SEQ ID NO: 2979 - RNA, 21 nt, RNAi-antisense strand
uucuuggcguagucugucauu

SEQ ID NO: 2980 - DNA, 21 bp, Homo sapiens
tacagaccaatgtctacatca

SEQ ID NO: 2981 - RNA, 21 nt, RNAi-sense strand
cagaccaaugucuacaucauu

SEQ ID NO: 2982 - RNA, 21 nt, RNAi-antisense strand
ugauguagacauuggucuguu

SEQ ID NO: 2983 - DNA, 21 bp, Homo sapiens
aaatcaggcggtctgcttgcc

SEQ ID NO: 2984 - RNA, 21 nt, RNAi-sense strand
aucaggcggucugcuugccuu

SEQ ID NO: 2985 - RNA, 21 nt, RNAi-antisense strand
ggcaagcagaccgccugauuu

SEQ ID NO: 2986 - DNA, 21 bp, Homo sapiens
aatcaggcggtctgcttgccg

SEQ ID NO: 2987 - RNA, 21 nt, RNAi-sense strand
ucaggcggucugcuugccguu

SEQ ID NO: 2988 - RNA, 21 nt, RNAi-antisense strand
cggcaagcagaccgccugauu

SEQ ID NO: 2989 - DNA, 21 bp, Homo sapiens
aagctagttcttctggagctc

SEQ ID NO: 2990 - RNA, 21 nt, RNAi-sense strand
gcuaguucuucuggagcucuu

SEQ ID NO: 2991 - RNA, 21 nt, RNAi-antisense strand
gagcuccagaagaacuagcuu

SEQ ID NO: 2992 - DNA, 21 bp, Homo sapiens
aagctgaccaaacagcagcta

SEQ ID NO: 2993 - RNA, 21 nt, RNAi-sense strand
gcugaccaaacagcagcuauu

SEQ ID NO: 2994 - RNA, 21 nt, RNAi-antisense strand
uagcugcuguuuggucagcuu

SEQ ID NO: 2995 - DNA, 21 bp, Homo sapiens
aaacagcagctaattctggcc

SEQ ID NO: 2996 - RNA, 21 nt, RNAi-sense strand
acagcagcuaauucuggccuu

SEQ ID NO: 2997 - RNA, 21 nt, RNAi-antisense strand
ggccagaauuagcugcuguuu

SEQ ID NO: 2998 - DNA, 21 bp, Homo sapiens
aatggagcatcctacgcaagg

SEQ ID NO: 2999 - RNA, 21 nt, RNAi-sense strand
uggagcauccuacgcaagguu

SEQ ID NO: 3000 - RNA, 21 nt, RNAi-antisense strand
ccuugcguaggaugcuccauu

SEQ ID NO: 3001 - DNA, 21 bp, Homo sapiens
aacctcctcttcctgctgtcc

SEQ ID NO: 3002 - RNA, 21 nt, RNAi-sense strand
ccuccucuuccugcuguccuu

SEQ ID NO: 3003 - RNA, 21 nt, RNAi-antisense strand
ggacagcaggaagaggagguu

SEQ ID NO: 3004 - DNA, 21 bp, Homo sapiens
aaggacatacagaccaatgtc

SEQ ID NO: 3005 - RNA, 21 nt, RNAi-sense strand
ggacauacagaccaaugucuu

SEQ ID NO: 3006 - RNA, 21 nt, RNAi-antisense strand
gacauuggucuguauguccuu

SEQ ID NO: 3007 - DNA, 21 bp, Homo sapiens
aacaaagtgttcctggccaag

SEQ ID NO: 3008 - RNA, 21 nt, RNAi-sense strand
caaaguguuccuggccaaguu

SEQ ID NO: 3009 - RNA, 21 nt, RNAi-antisense strand
cuuggccaggaacacuuuguu

SEQ ID NO: 3010 - DNA, 21 bp, Homo sapiens
aaagatgacagactacgccaa

SEQ ID NO: 3011 - RNA, 21 nt, RNAi-sense strand
agaugacagacuacgccaauu

SEQ ID NO: 3012 - RNA, 21 nt, RNAi-antisense strand
uuggcguagucugucaucuuu

SEQ ID NO: 3013 - DNA, 21 bp, Homo sapiens
aagatgacagactacgccaag

SEQ ID NO: 3014 - RNA, 21 nt, RNAi-sense strand
gaugacagacuacgccaaguu

SEQ ID NO: 3015 - RNA, 21 nt, RNAi-antisense strand
cuuggcguagucugucaucuu

SEQ ID NO: 3016 - DNA, 21 bp, Homo sapiens
aagccggaagacaccaccatt

SEQ ID NO: 3017 - RNA, 21 nt, RNAi-sense strand
gccggaagacaccaccauuuu

SEQ ID NO: 3018 - RNA, 21 nt, RNAi-antisense strand
aaugguggugucuuccggcuu

SEQ ID NO: 3019 - DNA, 21 bp, Homo sapiens
aactggccaaacaggtcatcg

SEQ ID NO: 3020 - RNA, 21 nt, RNAi-sense strand
cuggccaaacaggucaucguu

SEQ ID NO: 3021 - RNA, 21 nt, RNAi-antisense strand
cgaugaccuguuuggccaguu

SEQ ID NO: 3022 - DNA, 21 bp, Homo sapiens
aaacaggtcatcgagtatgcc

SEQ ID NO: 3023 - RNA, 21 nt, RNAi-sense strand
acaggucaucgaguaugccuu

SEQ ID NO: 3024 - RNA, 21 nt, RNAi-antisense strand
ggcauacucgaugaccuguuu

SEQ ID NO: 3025 - DNA, 21 bp, Homo sapiens
aataaaggtggactgacattc

SEQ ID NO: 3026 - RNA, 21 nt, RNAi-sense strand
uaaagguggacugacauucuu

SEQ ID NO: 3027 - RNA, 21 nt, RNAi-antisense strand
gaaugucaguccaccuuuauu

SEQ ID NO: 3028 - DNA, 21 bp, Homo sapiens
aaagaataaatgttggcagtg

SEQ ID NO: 3029 - RNA, 21 nt, RNAi-sense strand
agaauaaauguuggcaguguu

SEQ ID NO: 3030 - RNA, 21 nt, RNAi-antisense strand
cacugccaacauuuauucuuu

SEQ ID NO: 3031 - DNA, 21 bp, Homo sapiens
aagaataaatgttggcagtga

SEQ ID NO: 3032 - RNA, 21 nt, RNAi-sense strand
gaauaaauguuggcagugauu

SEQ ID NO: 3033 - RNA, 21 nt, RNAi-antisense strand
ucacugccaacauuuauucuu

SEQ ID NO: 3034 - DNA, 21 bp, Homo sapiens
aatgttggcagtgaattaaac

SEQ ID NO: 3035 - RNA, 21 nt, RNAi-sense strand
uguuggcagugaauuaaacuu

SEQ ID NO: 3036 - RNA, 21 nt, RNAi-antisense strand
guuuaauucacugccaacauu

SEQ ID NO: 3037 - DNA, 21 bp, Homo sapiens
caactgacatgttcattaagg

SEQ ID NO: 3038 - RNA, 21 nt, RNAi-sense strand
acugacauguucauuaagguu

SEQ ID NO: 3039 - RNA, 21 nt, RNAi-antisense strand
ccuuaaugaacaugucaguuu

SEQ ID NO: 3040 - DNA, 21 bp, Homo sapiens
caagctagttcttctggagct

SEQ ID NO: 3041 - RNA, 21 nt, RNAi-sense strand
agcuaguucuucuggagcuuu

SEQ ID NO: 3042 - RNA, 21 nt, RNAi-antisense strand
agcuccagaagaacuagcuuu

SEQ ID NO: 3043 - DNA, 21 bp, Homo sapiens
caacttcttgccaaccacagg

SEQ ID NO: 3044 - RNA, 21 nt, RNAi-sense strand
acuucuugccaaccacagguu

SEQ ID NO: 3045 - RNA, 21 nt, RNAi-antisense strand
ccugugguuggcaagaaguuu

SEQ ID NO: 3046 - DNA, 21 bp, Homo sapiens
caagctgaccaaacagcagct

SEQ ID NO: 3047 - RNA, 21 nt, RNAi-sense strand
agcugaccaaacagcagcuuu

SEQ ID NO: 3048 - RNA, 21 nt, RNAi-antisense strand
agcugcuguuuggucagcuuu

SEQ ID NO: 3049 - DNA, 21 bp, Homo sapiens
caaacagcagctaattctggc

SEQ ID NO: 3050 - RNA, 21 nt, RNAi-sense strand
aacagcagcuaauucuggcuu

SEQ ID NO: 3051 - RNA, 21 nt, RNAi-antisense strand
gccagaauuagcugcuguuuu

SEQ ID NO: 3052 - DNA, 21 bp, Homo sapiens
caatggagcatcctacgcaag

SEQ ID NO: 3053 - RNA, 21 nt, RNAi-sense strand
auggagcauccuacgcaaguu

SEQ ID NO: 3054 - RNA, 21 nt, RNAi-antisense strand
cuugcguaggaugcuccauuu

SEQ ID NO: 3055 - DNA, 21 bp, Homo sapiens
cagctcaaatgctactacttt

SEQ ID NO: 3056 - RNA, 21 nt, RNAi-sense strand
gcucaaaugcuacuacuuuuu

SEQ ID NO: 3057 - RNA, 21 nt, RNAi-antisense strand
aaaguaguagcauuugagcuu

SEQ ID NO: 3058 - DNA, 21 bp, Homo sapiens
cagcctatatgcaccagctct

SEQ ID NO: 3059 - RNA, 21 nt, RNAi-sense strand
gccuauaugcaccagcucuuu

SEQ ID NO: 3060 - RNA, 21 nt, RNAi-antisense strand
agagcuggugcauauaggcuu

SEQ ID NO: 3061 - DNA, 21 bp, Homo sapiens
caacctcctcttcctgctgtc

SEQ ID NO: 3062 - RNA, 21 nt, RNAi-sense strand
accuccucuuccugcugucuu

SEQ ID NO: 3063 - RNA, 21 nt, RNAi-antisense strand
gacagcaggaagaggagguuu

SEQ ID NO: 3064 - DNA, 21 bp, Homo sapiens
caaggacatacagaccaatgt

SEQ ID NO: 3065 - RNA, 21 nt, RNAi-sense strand
aggacauacagaccaauguuu

SEQ ID NO: 3066 - RNA, 21 nt, RNAi-antisense strand
acauuggucuguauguccuuu

SEQ ID NO: 3067 - DNA, 21 bp, Homo sapiens
catacagaccaatgtctacat

SEQ ID NO: 3068 - RNA, 21 nt, RNAi-sense strand
uacagaccaaugucuacauuu

SEQ ID NO: 3069 - RNA, 21 nt, RNAi-antisense strand
auguagacauuggucuguauu

SEQ ID NO: 3070 - DNA, 21 bp, Homo sapiens
cagaccaatgtctacatcaag

SEQ ID NO: 3071 - RNA, 21 nt, RNAi-sense strand
gaccaaugucuacaucaaguu

SEQ ID NO: 3072 - RNA, 21 nt, RNAi-antisense strand
cuugauguagacauuggucuu

SEQ ID NO: 3073 - DNA, 21 bp, Homo sapiens
cagctacaacaaagtgttcct

SEQ ID NO: 3074 - RNA, 21 nt, RNAi-sense strand
gcuacaacaaaguguuccuuu

SEQ ID NO: 3075 - RNA, 21 nt, RNAi-antisense strand
aggaacacuuuguuguagcuu

SEQ ID NO: 3076 - DNA, 21 bp, Homo sapiens
caacaaagtgttcctggccaa

SEQ ID NO: 3077 - RNA, 21 nt, RNAi-sense strand
acaaaguguuccuggccaauu

SEQ ID NO: 3078 - RNA, 21 nt, RNAi-antisense strand
uuggccaggaacacuuuguuu

SEQ ID NO: 3079 - DNA, 21 bp, Homo sapiens
caccttcttcattgacatcct

SEQ ID NO: 3080 - RNA, 21 nt, RNAi-sense strand
ccuucuucauugacauccuuu

SEQ ID NO: 3081 - RNA, 21 nt, RNAi-antisense strand
aggaugucaaugaagaagguu

SEQ ID NO: 3082 - DNA, 21 bp, Homo sapiens
cattgacatcctgctcgacac

SEQ ID NO: 3083 - RNA, 21 nt, RNAi-sense strand
uugacauccugcucgacacuu

SEQ ID NO: 3084 - RNA, 21 nt, RNAi-antisense strand
gugucgagcaggaugucaauu

SEQ ID NO: 3085 - DNA, 21 bp, Homo sapiens
catcctgctcgacactatcag

SEQ ID NO: 3086 - RNA, 21 nt, RNAi-sense strand
uccugcucgacacuaucaguu

SEQ ID NO: 3087 - RNA, 21 nt, RNAi-antisense strand
cugauagugucgagcaggauu

SEQ ID NO: 3088 - DNA, 21 bp, Homo sapiens
catcgagaaggcctacgagaa

SEQ ID NO: 3089 - RNA, 21 nt, RNAi-sense strand
ucgagaaggccuacgagaauu

SEQ ID NO: 3090 - RNA, 21 nt, RNAi-antisense strand
uucucguaggccuucucgauu

SEQ ID NO: 3091 - DNA, 21 bp, Homo sapiens
cagactacgccaagaagcgag

SEQ ID NO: 3092 - RNA, 21 nt, RNAi-sense strand
gacuacgccaagaagcgaguu

SEQ ID NO: 3093 - RNA, 21 nt, RNAi-antisense strand
cucgcuucuuggcguagucuu

SEQ ID NO: 3094 - DNA, 21 bp, Homo sapiens
cagcagcagaagccggaagac

SEQ ID NO: 3095 - RNA, 21 nt, RNAi-sense strand
gcagcagaagccggaagacuu

SEQ ID NO: 3096 - RNA, 21 nt, RNAi-antisense strand
gucuuccggcuucugcugcuu

SEQ ID NO: 3097 - DNA, 21 bp, Homo sapiens
cagcagaagccggaagacacc

SEQ ID NO: 3098 - RNA, 21 nt, RNAi-sense strand
gcagaagccggaagacaccuu

SEQ ID NO: 3099 - RNA, 21 nt, RNAi-antisense strand
ggugucuuccggcuucugcuu

SEQ ID NO: 3100 - DNA, 21 bp, Homo sapiens
cagaagccggaagacaccacc

SEQ ID NO: 3101 - RNA, 21 nt, RNAi-sense strand
gaagccggaagacaccaccuu

SEQ ID NO: 3102 - RNA, 21 nt, RNAi-antisense strand
gguggugucuuccggcuucuu

SEQ ID NO: 3103 - DNA, 21 bp, Homo sapiens
cacagaactggccaaacaggt

SEQ ID NO: 3104 - RNA, 21 nt, RNAi-sense strand
cagaacuggccaaacagguuu

SEQ ID NO: 3105 - RNA, 21 nt, RNAi-antisense strand
accuguuuggccaguucuguu

SEQ ID NO: 3106 - DNA, 21 bp, Homo sapiens
cagaactggccaaacaggtca

SEQ ID NO: 3107 - RNA, 21 nt, RNAi-sense strand
gaacuggccaaacaggucauu

SEQ ID NO: 3108 - RNA, 21 nt, RNAi-antisense strand
ugaccuguuuggccaguucuu

SEQ ID NO: 3109 - DNA, 21 bp, Homo sapiens
caaacaggtcatcgagtatgc

SEQ ID NO: 3110 - RNA, 21 nt, RNAi-sense strand
aacaggucaucgaguaugcuu

SEQ ID NO: 3111 - RNA, 21 nt, RNAi-antisense strand
gcauacucgaugaccuguuuu

SEQ ID NO: 3112 - DNA, 21 bp, Homo sapiens
cagctggagatgatcgtctga

SEQ ID NO: 3113 - RNA, 21 nt, RNAi-sense strand
gcuggagaugaucgucugauu

SEQ ID NO: 3114 - RNA, 21 nt, RNAi-antisense strand
ucagacgaucaucuccagcuu

SEQ ID NO: 3115 - DNA, 21 bp, Homo sapiens
caataaaggtggactgacatt

SEQ ID NO: 3116 - RNA, 21 nt, RNAi-sense strand
auaaagguggacugacauuuu

SEQ ID NO: 3117 - RNA, 21 nt, RNAi-antisense strand
aaugucaguccaccuuuauuu

SEQ ID NO: 3118 - DNA, 21 bp, Homo sapiens
cagagagacaagttcttatat

SEQ ID NO: 3119 - RNA, 21 nt, RNAi-sense strand
gagagacaaguucuuauauuu

SEQ ID NO: 3120 - RNA, 21 nt, RNAi-antisense strand
auauaagaacuugucucucuu

SEQ ID NO: 3121 - DNA, 21 bp, Homo sapiens
cattcaggagttggagatagc

SEQ ID NO: 3122 - RNA, 21 nt, RNAi-sense strand
uucaggaguuggagauagcuu

SEQ ID NO: 3123 - RNA, 21 nt, RNAi-antisense strand
gcuaucuccaacuccugaauu

SEQ ID NO: 3124 - DNA, 21 bp, Homo sapiens
caggagttggagatagcctcc

SEQ ID NO: 3125 - RNA, 21 nt, RNAi-sense strand
ggaguuggagauagccuccuu

SEQ ID NO: 3126 - RNA, 21 nt, RNAi-antisense strand
ggaggcuaucuccaacuccuu

SEQ ID NO: 3127 - DNA, 21 bp, Homo sapiens
cagctgtggacacataggaat

SEQ ID NO: 3128 - RNA, 21 nt, RNAi-sense strand
gcuguggacacauaggaauuu

SEQ ID NO: 3129 - RNA, 21 nt, RNAi-antisense strand
auuccuauguguccacagcuu

SEQ ID NO: 3130 - DNA, 21 bp, Homo sapiens
cacataggaatgctggaccag

SEQ ID NO: 3131 - RNA, 21 nt, RNAi-sense strand
cauaggaaugcuggaccaguu

SEQ ID NO: 3132 - RNA, 21 nt, RNAi-antisense strand
cugguccagcauuccuauguu

SEQ ID NO: 3133 - DNA, 21 bp, Homo sapiens
gaggcggagctccaactgaca

SEQ ID NO: 3134 - RNA, 21 nt, RNAi-sense strand
ggcggagcuccaacugacauu

SEQ ID NO: 3135 - RNA, 21 nt, RNAi-antisense strand
ugucaguuggagcuccgccuu

SEQ ID NO: 3136 - DNA, 21 bp, Homo sapiens
gagctccaactgacatgttca

SEQ ID NO: 3137 - RNA, 21 nt, RNAi-sense strand
gcuccaacugacauguucauu

SEQ ID NO: 3138 - RNA, 21 nt, RNAi-antisense strand
ugaacaugucaguuggagcuu

SEQ ID NO: 3139 - DNA, 21 bp, Homo sapiens
gaccggcatgtacgagcaact

SEQ ID NO: 3140 - RNA, 21 nt, RNAi-sense strand
ccggcauguacgagcaacuuu

SEQ ID NO: 3141 - RNA, 21 nt, RNAi-antisense strand
aguugcucguacaugccgguu

SEQ ID NO: 3142 - DNA, 21 bp, Homo sapiens
gactcaagctagttcttctgg

SEQ ID NO: 3143 - RNA, 21 nt, RNAi-sense strand
cucaagcuaguucuucugguu

SEQ ID NO: 3144 - RNA, 21 nt, RNAi-antisense strand
ccagaagaacuagcuugaguu

SEQ ID NO: 3145 - DNA, 21 bp, Homo sapiens
gagctcaacttcttgccaacc

SEQ ID NO: 3146 - RNA, 21 nt, RNAi-sense strand
gcucaacuucuugccaaccuu

SEQ ID NO: 3147 - RNA, 21 nt, RNAi-antisense strand
gguuggcaagaaguugagcuu

SEQ ID NO: 3148 - DNA, 21 bp, Homo sapiens
gaccaagctgaccaaacagca

SEQ ID NO: 3149 - RNA, 21 nt, RNAi-sense strand
ccaagcugaccaaacagcauu

SEQ ID NO: 3150 - RNA, 21 nt, RNAi-antisense strand
ugcuguuuggucagcuugguu

SEQ ID NO: 3151 - DNA, 21 bp, Homo sapiens
gaccaaacagcagctaattct

SEQ ID NO: 3152 - RNA, 21 nt, RNAi-sense strand
ccaaacagcagcuaauucuuu

SEQ ID NO: 3153 - RNA, 21 nt, RNAi-antisense strand
agaauuagcugcuguuugguu

SEQ ID NO: 3154 - DNA, 21 bp, Homo sapiens
gagcatcctacgcaaggacat

SEQ ID NO: 3155 - RNA, 21 nt, RNAi-sense strand
gcauccuacgcaaggacauuu

SEQ ID NO: 3156 - RNA, 21 nt, RNAi-antisense strand
auguccuugcguaggaugcuu

SEQ ID NO: 3157 - DNA, 21 bp, Homo sapiens
gagtcagcctatatgcaccag

SEQ ID NO: 3158 - RNA, 21 nt, RNAi-sense strand
gucagccuauaugcaccaguu

SEQ ID NO: 3159 - RNA, 21 nt, RNAi-antisense strand
cuggugcauauaggcugacuu

SEQ ID NO: 3160 - DNA, 21 bp, Homo sapiens
gagttccacacggagttggag

SEQ ID NO: 3161 - RNA, 21 nt, RNAi-sense strand
guuccacacggaguuggaguu

SEQ ID NO: 3162 - RNA, 21 nt, RNAi-antisense strand
cuccaacuccguguggaacuu

SEQ ID NO: 3163 - DNA, 21 bp, Homo sapiens
gacatacagaccaatgtctac

SEQ ID NO: 3164 - RNA, 21 nt, RNAi-sense strand
cauacagaccaaugucuacuu

SEQ ID NO: 3165 - RNA, 21 nt, RNAi-antisense strand
guagacauuggucuguauguu

SEQ ID NO: 3166 - DNA, 21 bp, Homo sapiens
gaccaatgtctacatcaagca

SEQ ID NO: 3167 - RNA, 21 nt, RNAi-sense strand
ccaaugucuacaucaagcauu

SEQ ID NO: 3168 - RNA, 21 nt, RNAi-antisense strand
ugcuugauguagacauugguu

SEQ ID NO: 3169 - DNA, 21 bp, Homo sapiens
gagagctacaccttcttcatt

SEQ ID NO: 3170 - RNA, 21 nt, RNAi-sense strand
gagcuacaccuucuucauuuu

SEQ ID NO: 3171 - RNA, 21 nt, RNAi-antisense strand
aaugaagaagguguagcucuu

SEQ ID NO: 3172 - DNA, 21 bp, Homo sapiens
gagctacaccttcttcattga

SEQ ID NO: 3173 - RNA, 21 nt, RNAi-sense strand
gcuacaccuucuucauugauu

SEQ ID NO: 3174 - RNA, 21 nt, RNAi-antisense strand
ucaaugaagaagguguagcuu

SEQ ID NO: 3175 - DNA, 21 bp, Homo sapiens
gacatcctgctcgacactatc

SEQ ID NO: 3176 - RNA, 21 nt, RNAi-sense strand
cauccugcucgacacuaucuu

SEQ ID NO: 3177 - RNA, 21 nt, RNAi-antisense strand
gauagugucgagcaggauguu

SEQ ID NO: 3178 - DNA, 21 bp, Homo sapiens
gatcctcttcttcaacacacc

SEQ ID NO: 3179 - RNA, 21 nt, RNAi-sense strand
uccucuucuucaacacaccuu

SEQ ID NO: 3180 - RNA, 21 nt, RNAi-antisense strand
gguguguugaagaagaggauu

SEQ ID NO: 3181 - DNA, 21 bp, Homo sapiens
gatgacagactacgccaagaa

SEQ ID NO: 3182 - RNA, 21 nt, RNAi-sense strand
ugacagacuacgccaagaauu

SEQ ID NO: 3183 - RNA, 21 nt, RNAi-antisense strand
uucuuggcguagucugucauu

SEQ ID NO: 3184 - DNA, 21 bp, Homo sapiens
gacagactacgccaagaagcg

SEQ ID NO: 3185 - RNA, 21 nt, RNAi-sense strand
cagacuacgccaagaagcguu

SEQ ID NO: 3186 - RNA, 21 nt, RNAi-antisense strand
cgcuucuuggcguagucuguu

SEQ ID NO: 3187 - DNA, 21 bp, Homo sapiens
gaagccggaagacaccaccat

SEQ ID NO: 3188 - RNA, 21 nt, RNAi-sense strand
agccggaagacaccaccauuu

SEQ ID NO: 3189 - RNA, 21 nt, RNAi-antisense strand
augguggugucuuccggcuuu

SEQ ID NO: 3190 - DNA, 21 bp, Homo sapiens
gaactggccaaacaggtcatc

SEQ ID NO: 3191 - RNA, 21 nt, RNAi-sense strand
acuggccaaacaggucaucuu

SEQ ID NO: 3192 - RNA, 21 nt, RNAi-antisense strand
gaugaccuguuuggccaguuu

SEQ ID NO: 3193 - DNA, 21 bp, Homo sapiens
gacggcagagagacaagttct

SEQ ID NO: 3194 - RNA, 21 nt, RNAi-sense strand
cggcagagagacaaguucuuu

SEQ ID NO: 3195 - RNA, 21 nt, RNAi-antisense strand
agaacuugucucucugccguu

SEQ ID NO: 3196 - DNA, 21 bp, Homo sapiens
gagagacaagttcttatatct

SEQ ID NO: 3197 - RNA, 21 nt, RNAi-sense strand
gagacaaguucuuauaucuuu

SEQ ID NO: 3198 - RNA, 21 nt, RNAi-antisense strand
agauauaagaacuugucucuu

SEQ ID NO: 3199 - DNA, 21 bp, Homo sapiens
gagacaagttcttatatctga

SEQ ID NO: 3200 - RNA, 21 nt, RNAi-sense strand
gacaaguucuuauaucugauu

SEQ ID NO: 3201 - RNA, 21 nt, RNAi-antisense strand
ucagauauaagaacuugucuu

SEQ ID NO: 3202 - DNA, 21 bp, Homo sapiens
gacaagttcttatatctgaag

SEQ ID NO: 3203 - RNA, 21 nt, RNAi-sense strand
caaguucuuauaucugaaguu

SEQ ID NO: 3204 - RNA, 21 nt, RNAi-antisense strand
cuucagauauaagaacuuguu

SEQ ID NO: 3205 - DNA, 21 bp, Homo sapiens
gagttggagatagcctccaac

SEQ ID NO: 3206 - RNA, 21 nt, RNAi-sense strand
guuggagauagccuccaacuu

SEQ ID NO: 3207 - RNA, 21 nt, RNAi-antisense strand
guuggaggcuaucuccaacuu

SEQ ID NO: 3208 - DNA, 21 bp, Homo sapiens
gactgttctagccagctgtgg

SEQ ID NO: 3209 - RNA, 21 nt, RNAi-sense strand
cuguucuagccagcugugguu

SEQ ID NO: 3210 - RNA, 21 nt, RNAi-antisense strand
ccacagcuggcuagaacaguu

SEQ ID NO: 3211 - DNA, 21 bp, Homo sapiens
gacacataggaatgctggacc

SEQ ID NO: 3212 - RNA, 21 nt, RNAi-sense strand
cacauaggaaugcuggaccuu

SEQ ID NO: 3213 - RNA, 21 nt, RNAi-antisense strand
gguccagcauuccuauguguu

SEQ ID NO: 3214 - DNA, 21 bp, Homo sapiens
gaataaatgttggcagtgaat

SEQ ID NO: 3215 - RNA, 21 nt, RNAi-sense strand
auaaauguuggcagugaauuu

SEQ ID NO: 3216 - RNA, 21 nt, RNAi-antisense strand
auucacugccaacauuuauuu

SEQ ID NO: 3217 - DNA, 21 bp, Homo sapiens
taaatcaggcggtctgcttgc

SEQ ID NO: 3218 - RNA, 21 nt, RNAi-sense strand
aaucaggcggucugcuugcuu

SEQ ID NO: 3219 - RNA, 21 nt, RNAi-antisense strand
gcaagcagaccgccugauuuu

SEQ ID NO: 3220 - DNA, 21 bp, Homo sapiens
tagttcttctggagctcaact

SEQ ID NO: 3221 - RNA, 21 nt, RNAi-sense strand
guucuucuggagcucaacuuu

SEQ ID NO: 3222 - RNA, 21 nt, RNAi-antisense strand
aguugagcuccagaagaacuu

SEQ ID NO: 3223 - DNA, 21 bp, Homo sapiens
tactactttgattacaaggag

SEQ ID NO: 3224 - RNA, 21 nt, RNAi-sense strand
cuacuuugauuacaaggaguu

SEQ ID NO: 3225 - RNA, 21 nt, RNAi-antisense strand
cuccuuguaaucaaaguaguu

SEQ ID NO: 3226 - DNA, 21 bp, Homo sapiens
tactttgattacaaggagcag

SEQ ID NO: 3227 - RNA, 21 nt, RNAi-sense strand
cuuugauuacaaggagcaguu

SEQ ID NO: 3228 - RNA, 21 nt, RNAi-antisense strand
cugcuccuuguaaucaaaguu

SEQ ID NO: 3229 - DNA, 21 bp, Homo sapiens
tacagaccaatgtctacatca

SEQ ID NO: 3230 - RNA, 21 nt, RNAi-sense strand
cagaccaaugucuacaucauu

SEQ ID NO: 3231 - RNA, 21 nt, RNAi-antisense strand
ugauguagacauuggucuguu

SEQ ID NO: 3232 - DNA, 21 bp, Homo sapiens
tacaacaaagtgttcctggcc

SEQ ID NO: 3233 - RNA, 21 nt, RNAi-sense strand
caacaaaguguuccuggccuu

SEQ ID NO: 3234 - RNA, 21 nt, RNAi-antisense strand
ggccaggaacacuuuguuguu

SEQ ID NO: 3235 - DNA, 21 bp, Homo sapiens
tacaccttcttcattgacatc

SEQ ID NO: 3236 - RNA, 21 nt, RNAi-sense strand
caccuucuucauugacaucuu

SEQ ID NO: 3237 - RNA, 21 nt, RNAi-antisense strand
gaugucaaugaagaagguguu

SEQ ID NO: 3238 - DNA, 21 bp, Homo sapiens
tatatctgaagaacttggagg

SEQ ID NO: 3239 - RNA, 21 nt, RNAi-sense strand
uaucugaagaacuuggagguu

SEQ ID NO: 3240 - RNA, 21 nt, RNAi-antisense strand
ccuccaaguucuucagauauu

SEQ ID NO: 3241 - DNA, 21 bp, Homo sapiens
tatctgaagaacttggaggtt

SEQ ID NO: 3242 - RNA, 21 nt, RNAi-sense strand
ucugaagaacuuggagguuuu

SEQ ID NO: 3243 - RNA, 21 nt, RNAi-antisense strand
aaccuccaaguucuucagauu

SEQ ID NO: 3244 - DNA, 21 bp, Homo sapiens
tagccagctgtggacacatag

SEQ ID NO: 3245 - RNA, 21 nt, RNAi-sense strand
gccagcuguggacacauaguu

SEQ ID NO: 3246 - RNA, 21 nt, RNAi-antisense strand
cuauguguccacagcuggcuu

SEQ ID NO: 3247 - DNA, 21 bp, Homo sapiens
aagctgaccaaacagcagcta

SEQ ID NO: 3248 - RNA, 21 nt, RNAi-sense strand
gcugaccaaacagcagcuauu

SEQ ID NO: 3249 - RNA, 21 nt, RNAi-antisense strand
uagcugcuguuuggucagcuu

SEQ ID NO: 3250 - DNA, 21 bp, Homo sapiens
aaacagcagctaattctggcc

SEQ ID NO: 3251 - RNA, 21 nt, RNAi-sense strand
acagcagcuaauucuggccuu

SEQ ID NO: 3252 - RNA, 21 nt, RNAi-antisense strand
ggccagaauuagcugcuguuu

SEQ ID NO: 3253 - DNA, 21 bp, Homo sapiens
aaagatgacagactacgccaa

SEQ ID NO: 3254 - RNA, 21 nt, RNAi-sense strand
agaugacagacuacgccaauu

SEQ ID NO: 3255 - RNA, 21 nt, RNAi-antisense strand
uuggcguagucugucaucuuu

SEQ ID NO: 3256 - DNA, 21 bp, Homo sapiens
aagatgacagactacgccaag

SEQ ID NO: 3257 - RNA, 21 nt, RNAi-sense strand
gaugacagacuacgccaaguu

SEQ ID NO: 3258 - RNA, 21 nt, RNAi-antisense strand
cuuggcguagucugucaucuu

SEQ ID NO: 3259 - DNA, 21 bp, Homo sapiens
caagctgaccaaacagcagct

SEQ ID NO: 3260 - RNA, 21 nt, RNAi-sense strand
agcugaccaaacagcagcuuu

SEQ ID NO: 3261 - RNA, 21 nt, RNAi-antisense strand
agcugcuguuuggucagcuuu

SEQ ID NO: 3262 - DNA, 21 bp, Homo sapiens
caaacagcagctaattctggc

SEQ ID NO: 3263 - RNA, 21 nt, RNAi-sense strand
aacagcagcuaauucuggcuu

SEQ ID NO: 3264 - RNA, 21 nt, RNAi-antisense strand
gccagaauuagcugcuguuuu

SEQ ID NO: 3265 - DNA, 21 bp, Homo sapiens
caatggagcatcctacgcaag

SEQ ID NO: 3266 - RNA, 21 nt, RNAi-sense strand
auggagcauccuacgcaaguu

SEQ ID NO: 3267 - RNA, 21 nt, RNAi-antisense strand
cuugcguaggaugcuccauuu

SEQ ID NO: 3268 - DNA, 21 bp, Homo sapiens
catacagaccaatgtctacat

SEQ ID NO: 3269 - RNA, 21 nt, RNAi-sense strand
uacagaccaaugucuacauuu

SEQ ID NO: 3270 - RNA, 21 nt, RNAi-antisense strand
auguagacauuggucuguauu

SEQ ID NO: 3271 - DNA, 21 bp, Homo sapiens
catcctgctcgacactatcag

SEQ ID NO: 3272 - RNA, 21 nt, RNAi-sense strand
uccugcucgacacuaucaguu

SEQ ID NO: 3273 - RNA, 21 nt, RNAi-antisense strand
cugauagugucgagcaggauu

SEQ ID NO: 3274 - DNA, 21 bp, Homo sapiens
gaccaagctgaccaaacagca

SEQ ID NO: 3275 - RNA, 21 nt, RNAi-sense strand
ccaagcugaccaaacagcauu

SEQ ID NO: 3276 - RNA, 21 nt, RNAi-antisense strand
ugcuguuuggucagcuugguu

SEQ ID NO: 3277 - DNA, 21 bp, Homo sapiens
gagcatcctacgcaaggacat

SEQ ID NO: 3278 - RNA, 21 nt, RNAi-sense strand
gcauccuacgcaaggacauuu

SEQ ID NO: 3279 - RNA, 21 nt, RNAi-antisense strand
auguccuugcguaggaugcuu

SEQ ID NO: 3280 - DNA, 21 bp, Homo sapiens
gagtcagcctatatgcaccag

SEQ ID NO: 3281 - RNA, 21 nt, RNAi-sense strand
gucagccuauaugcaccaguu

SEQ ID NO: 3282 - RNA, 21 nt, RNAi-antisense strand
cuggugcauauaggcugacuu

SEQ ID NO: 3283 - DNA, 21 bp, Homo sapiens
gacatacagaccaatgtctac

SEQ ID NO: 3284 - RNA, 21 nt, RNAi-sense strand
cauacagaccaaugucuacuu

SEQ ID NO: 3285 - RNA, 21 nt, RNAi-antisense strand
guagacauuggucuguauguu

SEQ ID NO: 3286 - DNA, 21 bp, Homo sapiens
gatgacagactacgccaagaa

SEQ ID NO: 3287 - RNA, 21 nt, RNAi-sense strand
ugacagacuacgccaagaauu

SEQ ID NO: 3288 - RNA, 21 nt, RNAi-antisense strand
uucuuggcguagucugucauu

SEQ ID NO: 3289 - DNA, 21 bp, Homo sapiens
tacagaccaatgtctacatca

SEQ ID NO: 3290 - RNA, 21 nt, RNAi-sense strand
cagaccaaugucuacaucauu

SEQ ID NO: 3291 - RNA, 21 nt, RNAi-antisense strand
ugauguagacauuggucuguu

SEQ ID NO: 3292 - DNA, 21 bp, Homo sapiens
aaatgaatatccaagagcagg

SEQ ID NO: 3293 - RNA, 21 nt, RNAi-sense strand
augaauauccaagagcagguu

SEQ ID NO: 3294 - RNA, 21 nt, RNAi-antisense strand
ccugcucuuggauauucauuu

SEQ ID NO: 3295 - DNA, 21 bp, Homo sapiens
aagtttcaccgaagatgctcc

SEQ ID NO: 3296 - RNA, 21 nt, RNAi-sense strand
guuucaccgaagaugcuccuu

SEQ ID NO: 3297 - RNA, 21 nt, RNAi-antisense strand
ggagcaucuucggugaaacuu

SEQ ID NO: 3298 - DNA, 21 bp, Homo sapiens
aaaggtgttggcattaaaggt

SEQ ID NO: 3299 - RNA, 21 nt, RNAi-sense strand
agguguuggcauuaaagguuu

SEQ ID NO: 3300 - RNA, 21 nt, RNAi-antisense strand
accuuuaaugccaacaccuuu

SEQ ID NO: 3301 - DNA, 21 bp, Homo sapiens
aaggtgttggcattaaaggtg

SEQ ID NO: 3302 - RNA, 21 nt, RNAi-sense strand
gguguuggcauuaaagguguu

SEQ ID NO: 3303 - RNA, 21 nt, RNAi-antisense strand
caccuuuaaugccaacaccuu

SEQ ID NO: 3304 - DNA, 21 bp, Homo sapiens
aaaggtgagacttcgacggcc

SEQ ID NO: 3305 - RNA, 21 nt, RNAi-sense strand
aggugagacuucgacggccuu

SEQ ID NO: 3306 - RNA, 21 nt, RNAi-antisense strand
ggccgucgaagucucaccuuu

SEQ ID NO: 3307 - DNA, 21 bp, Homo sapiens
aaggtgagacttcgacggcca

SEQ ID NO: 3308 - RNA, 21 nt, RNAi-sense strand
ggugagacuucgacggccauu

SEQ ID NO: 3309 - RNA, 21 nt, RNAi-antisense strand
uggccgucgaagucucaccuu

SEQ ID NO: 3310 - DNA, 21 bp, Homo sapiens
aagcctgttcaggactttcct

SEQ ID NO: 3311 - RNA, 21 nt, RNAi-sense strand
gccuguucaggacuuuccuuu

SEQ ID NO: 3312 - RNA, 21 nt, RNAi-antisense strand
aggaaaguccugaacaggcuu

SEQ ID NO: 3313 - DNA, 21 bp, Homo sapiens
aacgaggagaagaggctgaag

SEQ ID NO: 3314 - RNA, 21 nt, RNAi-sense strand
cgaggagaagaggcugaaguu

SEQ ID NO: 3315 - RNA, 21 nt, RNAi-antisense strand
cuucagccucuucuccucguu

SEQ ID NO: 3316 - DNA, 21 bp, Homo sapiens
aagaggctgaagctggcgaga

SEQ ID NO: 3317 - RNA, 21 nt, RNAi-sense strand
gaggcugaagcuggcgagauu

SEQ ID NO: 3318 - RNA, 21 nt, RNAi-antisense strand
ucucgccagcuucagccucuu

SEQ ID NO: 3319 - DNA, 21 bp, Homo sapiens
aagctggcgagagccatctac

SEQ ID NO: 3320 - RNA, 21 nt, RNAi-sense strand
gcuggcgagagccaucuacuu

SEQ ID NO: 3321 - RNA, 21 nt, RNAi-antisense strand
guagauggcucucgccagcuu

SEQ ID NO: 3322 - DNA, 21 bp, Homo sapiens
aagccagccaccaagagcttc

SEQ ID NO: 3323 - RNA, 21 nt, RNAi-sense strand
gccagccaccaagagcuucuu

SEQ ID NO: 3324 - RNA, 21 nt, RNAi-antisense strand
gaagcucuugguggcuggcuu

SEQ ID NO: 3325 - DNA, 21 bp, Homo sapiens
aagcagctgatcgatcctgcc

SEQ ID NO: 3326 - RNA, 21 nt, RNAi-sense strand
gcagcugaucgauccugccuu

SEQ ID NO: 3327 - RNA, 21 nt, RNAi-antisense strand
ggcaggaucgaucagcugcuu

SEQ ID NO: 3328 - DNA, 21 bp, Homo sapiens
aaatccaggccactatggagg

SEQ ID NO: 3329 - RNA, 21 nt, RNAi-sense strand
auccaggccacuauggagguu

SEQ ID NO: 3330 - RNA, 21 nt, RNAi-antisense strand
ccuccauaguggccuggauuu

SEQ ID NO: 3331 - DNA, 21 bp, Homo sapiens
aatccaggccactatggagga

SEQ ID NO: 3332 - RNA, 21 nt, RNAi-sense strand
uccaggccacuauggaggauu

SEQ ID NO: 3333 - RNA, 21 nt, RNAi-antisense strand
uccuccauaguggccuggauu

SEQ ID NO: 3334 - DNA, 21 bp, Homo sapiens
aatatacgaggacaggctcgg

SEQ ID NO: 3335 - RNA, 21 nt, RNAi-sense strand
uauacgaggacaggcucgguu

SEQ ID NO: 3336 - RNA, 21 nt, RNAi-antisense strand
ccgagccuguccucguauauu

SEQ ID NO: 3337 - DNA, 21 bp, Homo sapiens
aaagtctgtagtgaccagagc

SEQ ID NO: 3338 - RNA, 21 nt, RNAi-sense strand
agucuguagugaccagagcuu

SEQ ID NO: 3339 - RNA, 21 nt, RNAi-antisense strand
gcucuggucacuacagacuuu

SEQ ID NO: 3340 - DNA, 21 bp, Homo sapiens
aagtctgtagtgaccagagct

SEQ ID NO: 3341 - RNA, 21 nt, RNAi-sense strand
gucuguagugaccagagcuuu

SEQ ID NO: 3342 - RNA, 21 nt, RNAi-antisense strand
agcucuggucacuacagacuu

SEQ ID NO: 3343 - DNA, 21 bp, Homo sapiens
aaatgaagatgaggaatggaa

SEQ ID NO: 3344 - RNA, 21 nt, RNAi-sense strand
augaagaugaggaauggaauu

SEQ ID NO: 3345 - RNA, 21 nt, RNAi-antisense strand
uuccauuccucaucuucauuu

SEQ ID NO: 3346 - DNA, 21 bp, Homo sapiens
aatgaagatgaggaatggaag

SEQ ID NO: 3347 - RNA, 21 nt, RNAi-sense strand
ugaagaugaggaauggaaguu

SEQ ID NO: 3348 - RNA, 21 nt, RNAi-antisense strand
cuuccauuccucaucuucauu

SEQ ID NO: 3349 - DNA, 21 bp, Homo sapiens
aagatgaggaatggaagtgtg

SEQ ID NO: 3350 - RNA, 21 nt, RNAi-sense strand
gaugaggaauggaaguguguu

SEQ ID NO: 3351 - RNA, 21 nt, RNAi-antisense strand
cacacuuccauuccucaucuu

SEQ ID NO: 3352 - DNA, 21 bp, Homo sapiens
aatggaagtgtgaccaggaca

SEQ ID NO: 3353 - RNA, 21 nt, RNAi-sense strand
uggaagugugaccaggacauu

SEQ ID NO: 3354 - RNA, 21 nt, RNAi-antisense strand
uguccuggucacacuuccauu

SEQ ID NO: 3355 - DNA, 21 bp, Homo sapiens
aagtgtgaccaggacatggat

SEQ ID NO: 3356 - RNA, 21 nt, RNAi-sense strand
gugugaccaggacauggauuu

SEQ ID NO: 3357 - RNA, 21 nt, RNAi-antisense strand
auccauguccuggucacacuu

SEQ ID NO: 3358 - DNA, 21 bp, Homo sapiens
aagctgctcctggagacagct

SEQ ID NO: 3359 - RNA, 21 nt, RNAi-sense strand
gcugcuccuggagacagcuuu

SEQ ID NO: 3360 - RNA, 21 nt, RNAi-antisense strand
agcugucuccaggagcagcuu

SEQ ID NO: 3361 - DNA, 21 bp, Homo sapiens
aaggcagagagttcaggtatg

SEQ ID NO: 3362 - RNA, 21 nt, RNAi-sense strand
ggcagagaguucagguauguu

SEQ ID NO: 3363 - RNA, 21 nt, RNAi-antisense strand
cauaccugaacucucugccuu

SEQ ID NO: 3364 - DNA, 21 bp, Homo sapiens
aacgacagcgagcagcagagc

SEQ ID NO: 3365 - RNA, 21 nt, RNAi-sense strand
cgacagcgagcagcagagcuu

SEQ ID NO: 3366 - RNA, 21 nt, RNAi-antisense strand
gcucugcugcucgcugucguu

SEQ ID NO: 3367 - DNA, 21 bp, Homo sapiens
aagttcgcggaggagctcatc

SEQ ID NO: 3368 - RNA, 21 nt, RNAi-sense strand
guucgcggaggagcucaucuu

SEQ ID NO: 3369 - RNA, 21 nt, RNAi-antisense strand
gaugagcuccuccgcgaacuu

SEQ ID NO: 3370 - DNA, 21 bp, Homo sapiens
aagctggaggagcggctgaag

SEQ ID NO: 3371 - RNA, 21 nt, RNAi-sense strand
gcuggaggagcggcugaaguu

SEQ ID NO: 3372 - RNA, 21 nt, RNAi-antisense strand
cuucagccgcuccuccagcuu

SEQ ID NO: 3373 - DNA, 21 bp, Homo sapiens
aaggtgaggacggcgatccat

SEQ ID NO: 3374 - RNA, 21 nt, RNAi-sense strand
ggugaggacggcgauccauuu

SEQ ID NO: 3375 - RNA, 21 nt, RNAi-antisense strand
auggaucgccguccucaccuu

SEQ ID NO: 3376 - DNA, 21 bp, Homo sapiens
aaagaaatgccaagaaggctg

SEQ ID NO: 3377 - RNA, 21 nt, RNAi-sense strand
agaaaugccaagaaggcuguu

SEQ ID NO: 3378 - RNA, 21 nt, RNAi-antisense strand
cagccuucuuggcauuucuuu

SEQ ID NO: 3379 - DNA, 21 bp, Homo sapiens
aagaaatgccaagaaggctga

SEQ ID NO: 3380 - RNA, 21 nt, RNAi-sense strand
gaaaugccaagaaggcugauu

SEQ ID NO: 3381 - RNA, 21 nt, RNAi-antisense strand
ucagccuucuuggcauuucuu

SEQ ID NO: 3382 - DNA, 21 bp, Homo sapiens
aaatgccaagaaggctgagtc

SEQ ID NO: 3383 - RNA, 21 nt, RNAi-sense strand
augccaagaaggcugagucuu

SEQ ID NO: 3384 - RNA, 21 nt, RNAi-antisense strand
gacucagccuucuuggcauuu

SEQ ID NO: 3385 - DNA, 21 bp, Homo sapiens
aatgccaagaaggctgagtcg

SEQ ID NO: 3386 - RNA, 21 nt, RNAi-sense strand
ugccaagaaggcugagucguu

SEQ ID NO: 3387 - RNA, 21 nt, RNAi-antisense strand
cgacucagccuucuuggcauu

SEQ ID NO: 3388 - DNA, 21 bp, Homo sapiens
aaatcatgcagtggatcattg

SEQ ID NO: 3389 - RNA, 21 nt, RNAi-sense strand
aucaugcaguggaucauuguu

SEQ ID NO: 3390 - RNA, 21 nt, RNAi-antisense strand
caaugauccacugcaugauuu

SEQ ID NO: 3391 - DNA, 21 bp, Homo sapiens
aatcatgcagtggatcattga

SEQ ID NO: 3392 - RNA, 21 nt, RNAi-sense strand
ucaugcaguggaucauugauu

SEQ ID NO: 3393 - RNA, 21 nt, RNAi-antisense strand
ucaaugauccacugcaugauu

SEQ ID NO: 3394 - DNA, 21 bp, Homo sapiens
aaaggagatcagcaggcaccg

SEQ ID NO: 3395 - RNA, 21 nt, RNAi-sense strand
aggagaucagcaggcaccguu

SEQ ID NO: 3396 - RNA, 21 nt, RNAi-antisense strand
cggugccugcugaucuccuuu

SEQ ID NO: 3397 - DNA, 21 bp, Homo sapiens
aaggagatcagcaggcaccgc

SEQ ID NO: 3398 - RNA, 21 nt, RNAi-sense strand
ggagaucagcaggcaccgcuu

SEQ ID NO: 3399 - RNA, 21 nt, RNAi-antisense strand
gcggugccugcugaucuccuu

SEQ ID NO: 3400 - DNA, 21 bp, Homo sapiens
aaagagagccagccgagcacc

SEQ ID NO: 3401 - RNA, 21 nt, RNAi-sense strand
agagagccagccgagcaccuu

SEQ ID NO: 3402 - RNA, 21 nt, RNAi-antisense strand
ggugcucggcuggcucucuuu

SEQ ID NO: 3403 - DNA, 21 bp, Homo sapiens
aagcagaggacaagatcgcag

SEQ ID NO: 3404 - RNA, 21 nt, RNAi-sense strand
gcagaggacaagaucgcaguu

SEQ ID NO: 3405 - RNA, 21 nt, RNAi-antisense strand
cugcgaucuuguccucugcuu

SEQ ID NO: 3406 - DNA, 21 bp, Homo sapiens
aagaaagtgagcgacgagttt

SEQ ID NO: 3407 - RNA, 21 nt, RNAi-sense strand
gaaagugagcgacgaguuuuu

SEQ ID NO: 3408 - RNA, 21 nt, RNAi-antisense strand
aaacucgucgcucacuuucuu

SEQ ID NO: 3409 - DNA, 21 bp, Homo sapiens
aaagtgagcgacgagtttgac

SEQ ID NO: 3410 - RNA, 21 nt, RNAi-sense strand
agugagcgacgaguuugacuu

SEQ ID NO: 3411 - RNA, 21 nt, RNAi-antisense strand
gucaaacucgucgcucacuuu

SEQ ID NO: 3412 - DNA, 21 bp, Homo sapiens
aagtgagcgacgagtttgact

SEQ ID NO: 3413 - RNA, 21 nt, RNAi-sense strand
gugagcgacgaguuugacuuu

SEQ ID NO: 3414 - RNA, 21 nt, RNAi-antisense strand
agucaaacucgucgcucacuu

SEQ ID NO: 3415 - DNA, 21 bp, Homo sapiens
aagatcatcggcaaagtggag

SEQ ID NO: 3416 - RNA, 21 nt, RNAi-sense strand
gaucaucggcaaaguggaguu

SEQ ID NO: 3417 - RNA, 21 nt, RNAi-antisense strand
cuccacuuugccgaugaucuu

SEQ ID NO: 3418 - DNA, 21 bp, Homo sapiens
aaagtggagaaggtggactga

SEQ ID NO: 3419 - RNA, 21 nt, RNAi-sense strand
aguggagaagguggacugauu

SEQ ID NO: 3420 - RNA, 21 nt, RNAi-antisense strand
ucaguccaccuucuccacuuu

SEQ ID NO: 3421 - DNA, 21 bp, Homo sapiens
aagtggagaaggtggactgat

SEQ ID NO: 3422 - RNA, 21 nt, RNAi-sense strand
guggagaagguggacugauuu

SEQ ID NO: 3423 - RNA, 21 nt, RNAi-antisense strand
aucaguccaccuucuccacuu

SEQ ID NO: 3424 - DNA, 21 bp, Homo sapiens
aaggtggactgataggctggt

SEQ ID NO: 3425 - RNA, 21 nt, RNAi-sense strand
gguggacugauaggcugguuu

SEQ ID NO: 3426 - RNA, 21 nt, RNAi-antisense strand
accagccuaucaguccaccuu

SEQ ID NO: 3427 - DNA, 21 bp, Homo sapiens
aagtggtccacaagcttctgt

SEQ ID NO: 3428 - RNA, 21 nt, RNAi-sense strand
gugguccacaagcuucuguuu

SEQ ID NO: 3429 - RNA, 21 nt, RNAi-antisense strand
acagaagcuuguggaccacuu

SEQ ID NO: 3430 - DNA, 21 bp, Homo sapiens
aaggaggcagcctggaccact

SEQ ID NO: 3431 - RNA, 21 nt, RNAi-sense strand
ggaggcagccuggaccacuuu

SEQ ID NO: 3432 - RNA, 21 nt, RNAi-antisense strand
agugguccaggcugccuccuu

SEQ ID NO: 3433 - DNA, 21 bp, Homo sapiens
aattgtacgcgccaccgagtg

SEQ ID NO: 3434 - RNA, 21 nt, RNAi-sense strand
uuguacgcgccaccgaguguu

SEQ ID NO: 3435 - RNA, 21 nt, RNAi-antisense strand
cacucgguggcgcguacaauu

SEQ ID NO: 3436 - DNA, 21 bp, Homo sapiens
aacacagcttgtctcttgcct

SEQ ID NO: 3437 - RNA, 21 nt, RNAi-sense strand
cacagcuugucucuugccuuu

SEQ ID NO: 3438 - RNA, 21 nt, RNAi-antisense strand
aggcaagagacaagcuguguu

SEQ ID NO: 3439 - DNA, 21 bp, Homo sapiens
aatcggcgacggagcactgca

SEQ ID NO: 3440 - RNA, 21 nt, RNAi-sense strand
ucggcgacggagcacugcauu

SEQ ID NO: 3441 - RNA, 21 nt, RNAi-antisense strand
ugcagugcuccgucgccgauu

SEQ ID NO: 3442 - DNA, 21 bp, Homo sapiens
aaatatgtacatttctcaggc

SEQ ID NO: 3443 - RNA, 21 nt, RNAi-sense strand
auauguacauuucucaggcuu

SEQ ID NO: 3444 - RNA, 21 nt, RNAi-antisense strand
gccugagaaauguacauauuu

SEQ ID NO: 3445 - DNA, 21 bp, Homo sapiens
aatatgtacatttctcaggct

SEQ ID NO: 3446 - RNA, 21 nt, RNAi-sense strand
uauguacauuucucaggcuuu

SEQ ID NO: 3447 - RNA, 21 nt, RNAi-antisense strand
agccugagaaauguacauauu

SEQ ID NO: 3448 - DNA, 21 bp, Homo sapiens
cagattgattcactttggagc

SEQ ID NO: 3449 - RNA, 21 nt, RNAi-sense strand
gauugauucacuuuggagcuu

SEQ ID NO: 3450 - RNA, 21 nt, RNAi-antisense strand
gcuccaaagugaaucaaucuu

SEQ ID NO: 3451 - DNA, 21 bp, Homo sapiens
cactttggagctgtaagtact

SEQ ID NO: 3452 - RNA, 21 nt, RNAi-sense strand
cuuuggagcuguaaguacuuu

SEQ ID NO: 3453 - RNA, 21 nt, RNAi-antisense strand
aguacuuacagcuccaaaguu

SEQ ID NO: 3454 - DNA, 21 bp, Homo sapiens
cagcgctcattgttccttgac

SEQ ID NO: 3455 - RNA, 21 nt, RNAi-sense strand
gcgcucauuguuccuugacuu

SEQ ID NO: 3456 - RNA, 21 nt, RNAi-antisense strand
gucaaggaacaaugagcgcuu

SEQ ID NO: 3457 - DNA, 21 bp, Homo sapiens
cattgttccttgacgcagagt

SEQ ID NO: 3458 - RNA, 21 nt, RNAi-sense strand
uuguuccuugacgcagaguuu

SEQ ID NO: 3459 - RNA, 21 nt, RNAi-antisense strand
acucugcgucaaggaacaauu

SEQ ID NO: 3460 - DNA, 21 bp, Homo sapiens
caagtttcaccgaagatgctc

SEQ ID NO: 3461 - RNA, 21 nt, RNAi-sense strand
aguuucaccgaagaugcucuu

SEQ ID NO: 3462 - RNA, 21 nt, RNAi-antisense strand
gagcaucuucggugaaacuuu

SEQ ID NO: 3463 - DNA, 21 bp, Homo sapiens
cagctacagtttctgctccgg

SEQ ID NO: 3464 - RNA, 21 nt, RNAi-sense strand
gcuacaguuucugcuccgguu

SEQ ID NO: 3465 - RNA, 21 nt, RNAi-antisense strand
ccggagcagaaacuguagcuu

SEQ ID NO: 3466 - DNA, 21 bp, Homo sapiens
cattaaaggtgagacttcgac

SEQ ID NO: 3467 - RNA, 21 nt, RNAi-sense strand
uuaaaggugagacuucgacuu

SEQ ID NO: 3468 - RNA, 21 nt, RNAi-antisense strand
gucgaagucucaccuuuaauu

SEQ ID NO: 3469 - DNA, 21 bp, Homo sapiens
caggactttcctgaagcagga

SEQ ID NO: 3470 - RNA, 21 nt, RNAi-sense strand
ggacuuuccugaagcaggauu

SEQ ID NO: 3471 - RNA, 21 nt, RNAi-antisense strand
uccugcuucaggaaaguccuu

SEQ ID NO: 3472 - DNA, 21 bp, Homo sapiens
cactggcttcaggaagctgga

SEQ ID NO: 3473 - RNA, 21 nt, RNAi-sense strand
cuggcuucaggaagcuggauu

SEQ ID NO: 3474 - RNA, 21 nt, RNAi-antisense strand
uccagcuuccugaagccaguu

SEQ ID NO: 3475 - DNA, 21 bp, Homo sapiens
catctaccgaaagtacattct

SEQ ID NO: 3476 - RNA, 21 nt, RNAi-sense strand
ucuaccgaaaguacauucuuu

SEQ ID NO: 3477 - RNA, 21 nt, RNAi-antisense strand
agaauguacuuucgguagauu

SEQ ID NO: 3478 - DNA, 21 bp, Homo sapiens
cattcttgataacaatggcat

SEQ ID NO: 3479 - RNA, 21 nt, RNAi-sense strand
uucuugauaacaauggcauuu

SEQ ID NO: 3480 - RNA, 21 nt, RNAi-antisense strand
augccauuguuaucaagaauu

SEQ ID NO: 3481 - DNA, 21 bp, Homo sapiens
cagaccaagccagccaccaag

SEQ ID NO: 3482 - RNA, 21 nt, RNAi-sense strand
gaccaagccagccaccaaguu

SEQ ID NO: 3483 - RNA, 21 nt, RNAi-antisense strand
cuugguggcuggcuuggucuu

SEQ ID NO: 3484 - DNA, 21 bp, Homo sapiens
caagccagccaccaagagctt

SEQ ID NO: 3485 - RNA, 21 nt, RNAi-sense strand
agccagccaccaagagcuuuu

SEQ ID NO: 3486 - RNA, 21 nt, RNAi-antisense strand
aagcucuugguggcuggcuuu

SEQ ID NO: 3487 - DNA, 21 bp, Homo sapiens
cagccaccaagagcttcataa

SEQ ID NO: 3488 - RNA, 21 nt, RNAi-sense strand
gccaccaagagcuucauaauu

SEQ ID NO: 3489 - RNA, 21 nt, RNAi-antisense strand
uuaugaagcucuugguggcuu

SEQ ID NO: 3490 - DNA, 21 bp, Homo sapiens
catcatgaagcagctgatcga

SEQ ID NO: 3491 - RNA, 21 nt, RNAi-sense strand
ucaugaagcagcugaucgauu

SEQ ID NO: 3492 - RNA, 21 nt, RNAi-antisense strand
ucgaucagcugcuucaugauu

SEQ ID NO: 3493 - DNA, 21 bp, Homo sapiens
catgaagcagctgatcgatcc

SEQ ID NO: 3494 - RNA, 21 nt, RNAi-sense strand
ugaagcagcugaucgauccuu

SEQ ID NO: 3495 - RNA, 21 nt, RNAi-antisense strand
ggaucgaucagcugcuucauu

SEQ ID NO: 3496 - DNA, 21 bp, Homo sapiens
cagctgatcgatcctgccatg

SEQ ID NO: 3497 - RNA, 21 nt, RNAi-sense strand
gcugaucgauccugccauguu

SEQ ID NO: 3498 - RNA, 21 nt, RNAi-antisense strand
cauggcaggaucgaucagcuu

SEQ ID NO: 3499 - DNA, 21 bp, Homo sapiens
cagaccgaaatccaggccact

SEQ ID NO: 3500 - RNA, 21 nt, RNAi-sense strand
gaccgaaauccaggccacuuu

SEQ ID NO: 3501 - RNA, 21 nt, RNAi-antisense strand
aguggccuggauuucggucuu

SEQ ID NO: 3502 - DNA, 21 bp, Homo sapiens
caaagtctgtagtgaccagag

SEQ ID NO: 3503 - RNA, 21 nt, RNAi-sense strand
aagucuguagugaccagaguu

SEQ ID NO: 3504 - RNA, 21 nt, RNAi-antisense strand
cucuggucacuacagacuuuu

SEQ ID NO: 3505 - DNA, 21 bp, Homo sapiens
catatctggatacctgccgac

SEQ ID NO: 3506 - RNA, 21 nt, RNAi-sense strand
uaucuggauaccugccgacuu

SEQ ID NO: 3507 - RNA, 21 nt, RNAi-antisense strand
gucggcagguauccagauauu

SEQ ID NO: 3508 - DNA, 21 bp, Homo sapiens
caggacatggatgaggacgat

SEQ ID NO: 3509 - RNA, 21 nt, RNAi-sense strand
ggacauggaugaggacgauuu

SEQ ID NO: 3510 - RNA, 21 nt, RNAi-antisense strand
aucguccucauccauguccuu

SEQ ID NO: 3511 - DNA, 21 bp, Homo sapiens
catggatgaggacgatggcag

SEQ ID NO: 3512 - RNA, 21 nt, RNAi-sense strand
uggaugaggacgauggcaguu

SEQ ID NO: 3513 - RNA, 21 nt, RNAi-antisense strand
cugccaucguccucauccauu

SEQ ID NO: 3514 - DNA, 21 bp, Homo sapiens
cagaagctgctcctggagaca

SEQ ID NO: 3515 - RNA, 21 nt, RNAi-sense strand
gaagcugcuccuggagacauu

SEQ ID NO: 3516 - RNA, 21 nt, RNAi-antisense strand
ugucuccaggagcagcuucuu

SEQ ID NO: 3517 - DNA, 21 bp, Homo sapiens
cagtagacggtacagcgaagg

SEQ ID NO: 3518 - RNA, 21 nt, RNAi-sense strand
guagacgguacagcgaagguu

SEQ ID NO: 3519 - RNA, 21 nt, RNAi-antisense strand
ccuucgcuguaccgucuacuu

SEQ ID NO: 3520 - DNA, 21 bp, Homo sapiens
cagcgaaggcagagagttcag

SEQ ID NO: 3521 - RNA, 21 nt, RNAi-sense strand
gcgaaggcagagaguucaguu

SEQ ID NO: 3522 - RNA, 21 nt, RNAi-antisense strand
cugaacucucugccuucgcuu

SEQ ID NO: 3523 - DNA, 21 bp, Homo sapiens
cagagagttcaggtatggatc

SEQ ID NO: 3524 - RNA, 21 nt, RNAi-sense strand
gagaguucagguauggaucuu

SEQ ID NO: 3525 - RNA, 21 nt, RNAi-antisense strand
gauccauaccugaacucucuu

SEQ ID NO: 3526 - DNA, 21 bp, Homo sapiens
cagccaccagtgccaacgaca

SEQ ID NO: 3527 - RNA, 21 nt, RNAi-sense strand
gccaccagugccaacgacauu

SEQ ID NO: 3528 - RNA, 21 nt, RNAi-antisense strand
ugucguuggcacugguggcuu

SEQ ID NO: 3529 - DNA, 21 bp, Homo sapiens
caccagtgccaacgacagcga

SEQ ID NO: 3530 - RNA, 21 nt, RNAi-sense strand
ccagugccaacgacagcgauu

SEQ ID NO: 3531 - RNA, 21 nt, RNAi-antisense strand
ucgcugucguuggcacugguu

SEQ ID NO: 3532 - DNA, 21 bp, Homo sapiens
cagtgccaacgacagcgagca

SEQ ID NO: 3533 - RNA, 21 nt, RNAi-sense strand
gugccaacgacagcgagcauu

SEQ ID NO: 3534 - RNA, 21 nt, RNAi-antisense strand
ugcucgcugucguuggcacuu

SEQ ID NO: 3535 - DNA, 21 bp, Homo sapiens
caacgacagcgagcagcagag

SEQ ID NO: 3536 - RNA, 21 nt, RNAi-sense strand
acgacagcgagcagcagaguu

SEQ ID NO: 3537 - RNA, 21 nt, RNAi-antisense strand
cucugcugcucgcugucguuu

SEQ ID NO: 3538 - DNA, 21 bp, Homo sapiens
cagcagagcctgtccagcgat

SEQ ID NO: 3539 - RNA, 21 nt, RNAi-sense strand
gcagagccuguccagcgauuu

SEQ ID NO: 3540 - RNA, 21 nt, RNAi-antisense strand
aucgcuggacaggcucugcuu

SEQ ID NO: 3541 - DNA, 21 bp, Homo sapiens
cagagcctgtccagcgatgca

SEQ ID NO: 3542 - RNA, 21 nt, RNAi-sense strand
gagccuguccagcgaugcauu

SEQ ID NO: 3543 - RNA, 21 nt, RNAi-antisense strand
ugcaucgcuggacaggcucuu

SEQ ID NO: 3544 - DNA, 21 bp, Homo sapiens
catacaggatccgtaagcagc

SEQ ID NO: 3545 - RNA, 21 nt, RNAi-sense strand
uacaggauccguaagcagcuu

SEQ ID NO: 3546 - RNA, 21 nt, RNAi-antisense strand
gcugcuuacggauccuguauu

SEQ ID NO: 3547 - DNA, 21 bp, Homo sapiens
caggatccgtaagcagcaccg

SEQ ID NO: 3548 - RNA, 21 nt, RNAi-sense strand
ggauccguaagcagcaccguu

SEQ ID NO: 3549 - RNA, 21 nt, RNAi-antisense strand
cggugcugcuuacggauccuu

SEQ ID NO: 3550 - DNA, 21 bp, Homo sapiens
caggagagcgtgcaggtcaat

SEQ ID NO: 3551 - RNA, 21 nt, RNAi-sense strand
ggagagcgugcaggucaauuu

SEQ ID NO: 3552 - RNA, 21 nt, RNAi-antisense strand
auugaccugcacgcucuccuu

SEQ ID NO: 3553 - DNA, 21 bp, Homo sapiens
cagaagttcgcggaggagctc

SEQ ID NO: 3554 - RNA, 21 nt, RNAi-sense strand
gaaguucgcggaggagcucuu

SEQ ID NO: 3555 - RNA, 21 nt, RNAi-antisense strand
gagcuccuccgcgaacuucuu

SEQ ID NO: 3556 - DNA, 21 bp, Homo sapiens
catggaggaggaaggtgagga

SEQ ID NO: 3557 - RNA, 21 nt, RNAi-sense strand
uggaggaggaaggugaggauu

SEQ ID NO: 3558 - RNA, 21 nt, RNAi-antisense strand
uccucaccuuccuccuccauu

SEQ ID NO: 3559 - DNA, 21 bp, Homo sapiens
catcctggacgagcacgtaca

SEQ ID NO: 3560 - RNA, 21 nt, RNAi-sense strand
uccuggacgagcacguacauu

SEQ ID NO: 3561 - RNA, 21 nt, RNAi-antisense strand
uguacgugcucguccaggauu

SEQ ID NO: 3562 - DNA, 21 bp, Homo sapiens
cacgtacagcgtgtgctgagg

SEQ ID NO: 3563 - RNA, 21 nt, RNAi-sense strand
cguacagcgugugcugagguu

SEQ ID NO: 3564 - RNA, 21 nt, RNAi-antisense strand
ccucagcacacgcuguacguu

SEQ ID NO: 3565 - DNA, 21 bp, Homo sapiens
cagcgtgtgctgaggacacct

SEQ ID NO: 3566 - RNA, 21 nt, RNAi-sense strand
gcgugugcugaggacaccuuu

SEQ ID NO: 3567 - RNA, 21 nt, RNAi-antisense strand
agguguccucagcacacgcuu

SEQ ID NO: 3568 - DNA, 21 bp, Homo sapiens
cacgtggccaagatgccagtg

SEQ ID NO: 3569 - RNA, 21 nt, RNAi-sense strand
cguggccaagaugccaguguu

SEQ ID NO: 3570 - RNA, 21 nt, RNAi-antisense strand
cacuggcaucuuggccacguu

SEQ ID NO: 3571 - DNA, 21 bp, Homo sapiens
caccacgtccaccacagcaca

SEQ ID NO: 3572 - RNA, 21 nt, RNAi-sense strand
ccacguccaccacagcacauu

SEQ ID NO: 3573 - RNA, 21 nt, RNAi-antisense strand
ugugcugugguggacgugguu

SEQ ID NO: 3574 - DNA, 21 bp, Homo sapiens
caagcagaggacaagatcgca

SEQ ID NO: 3575 - RNA, 21 nt, RNAi-sense strand
agcagaggacaagaucgcauu

SEQ ID NO: 3576 - RNA, 21 nt, RNAi-antisense strand
ugcgaucuuguccucugcuuu

SEQ ID NO: 3577 - DNA, 21 bp, Homo sapiens
cagaggacaagatcgcagagg

SEQ ID NO: 3578 - RNA, 21 nt, RNAi-sense strand
gaggacaagaucgcagagguu

SEQ ID NO: 3579 - RNA, 21 nt, RNAi-antisense strand
ccucugcgaucuuguccucuu

SEQ ID NO: 3580 - DNA, 21 bp, Homo sapiens
caagatcgcagaggaaggtgg

SEQ ID NO: 3581 - RNA, 21 nt, RNAi-sense strand
agaucgcagaggaaggugguu

SEQ ID NO: 3582 - RNA, 21 nt, RNAi-antisense strand
ccaccuuccucugcgaucuuu

SEQ ID NO: 3583 - DNA, 21 bp, Homo sapiens
cagccgtgtgacagcatcgtt

SEQ ID NO: 3584 - RNA, 21 nt, RNAi-sense strand
gccgugugacagcaucguuuu

SEQ ID NO: 3585 - RNA, 21 nt, RNAi-antisense strand
aacgaugcugucacacggcuu

SEQ ID NO: 3586 - DNA, 21 bp, Homo sapiens
cagcatcgttgtggcgtacta

SEQ ID NO: 3587 - RNA, 21 nt, RNAi-sense strand
gcaucguuguggcguacuauu

SEQ ID NO: 3588 - RNA, 21 nt, RNAi-antisense strand
uaguacgccacaacgaugcuu

SEQ ID NO: 3589 - DNA, 21 bp, Homo sapiens
catcgttgtggcgtactactt

SEQ ID NO: 3590 - RNA, 21 nt, RNAi-sense strand
ucguuguggcguacuacuuuu

SEQ ID NO: 3591 - RNA, 21 nt, RNAi-antisense strand
aaguaguacgccacaacgauu

SEQ ID NO: 3592 - DNA, 21 bp, Homo sapiens
cagttcaaggagctgctgacc

SEQ ID NO: 3593 - RNA, 21 nt, RNAi-sense strand
guucaaggagcugcugaccuu

SEQ ID NO: 3594 - RNA, 21 nt, RNAi-antisense strand
ggucagcagcuccuugaacuu

SEQ ID NO: 3595 - DNA, 21 bp, Homo sapiens
cagctacagatactacttcaa

SEQ ID NO: 3596 - RNA, 21 nt, RNAi-sense strand
gcuacagauacuacuucaauu

SEQ ID NO: 3597 - RNA, 21 nt, RNAi-antisense strand
uugaaguaguaucuguagcuu

SEQ ID NO: 3598 - DNA, 21 bp, Homo sapiens
cagatactacttcaagaaagt

SEQ ID NO: 3599 - RNA, 21 nt, RNAi-sense strand
gauacuacuucaagaaaguuu

SEQ ID NO: 3600 - RNA, 21 nt, RNAi-antisense strand
acuuucuugaaguaguaucuu

SEQ ID NO: 3601 - DNA, 21 bp, Homo sapiens
caagaaagtgagcgacgagtt

SEQ ID NO: 3602 - RNA, 21 nt, RNAi-sense strand
agaaagugagcgacgaguuuu

SEQ ID NO: 3603 - RNA, 21 nt, RNAi-antisense strand
aacucgucgcucacuuucuuu

SEQ ID NO: 3604 - DNA, 21 bp, Homo sapiens
catcggcaaagtggagaaggt

SEQ ID NO: 3605 - RNA, 21 nt, RNAi-sense strand
ucggcaaaguggagaagguuu

SEQ ID NO: 3606 - RNA, 21 nt, RNAi-antisense strand
accuucuccacuuugccgauu

SEQ ID NO: 3607 - DNA, 21 bp, Homo sapiens
caaagtggagaaggtggactg

SEQ ID NO: 3608 - RNA, 21 nt, RNAi-sense strand
aaguggagaagguggacuguu

SEQ ID NO: 3609 - RNA, 21 nt, RNAi-antisense strand
caguccaccuucuccacuuuu

SEQ ID NO: 3610 - DNA, 21 bp, Homo sapiens
caggcagatgacctcgtactc

SEQ ID NO: 3611 - RNA, 21 nt, RNAi-sense strand
ggcagaugaccucguacucuu

SEQ ID NO: 3612 - RNA, 21 nt, RNAi-antisense strand
gaguacgaggucaucugccuu

SEQ ID NO: 3613 - DNA, 21 bp, Homo sapiens
cagatgacctcgtactcagga

SEQ ID NO: 3614 - RNA, 21 nt, RNAi-sense strand
gaugaccucguacucaggauu

SEQ ID NO: 3615 - RNA, 21 nt, RNAi-antisense strand
uccugaguacgaggucaucuu

SEQ ID NO: 3616 - DNA, 21 bp, Homo sapiens
caagtggtccacaagcttctg

SEQ ID NO: 3617 - RNA, 21 nt, RNAi-sense strand
agugguccacaagcuucuguu

SEQ ID NO: 3618 - RNA, 21 nt, RNAi-antisense strand
cagaagcuuguggaccacuuu

SEQ ID NO: 3619 - DNA, 21 bp, Homo sapiens
cagcctggaccactcctcata

SEQ ID NO: 3620 - RNA, 21 nt, RNAi-sense strand
gccuggaccacuccucauauu

SEQ ID NO: 3621 - RNA, 21 nt, RNAi-antisense strand
uaugaggagugguccaggcuu

SEQ ID NO: 3622 - DNA, 21 bp, Homo sapiens
cactcctcatagcaatacttg

SEQ ID NO: 3623 - RNA, 21 nt, RNAi-sense strand
cuccucauagcaauacuuguu

SEQ ID NO: 3624 - RNA, 21 nt, RNAi-antisense strand
caaguauugcuaugaggaguu

SEQ ID NO: 3625 - DNA, 21 bp, Homo sapiens
caattgtacgcgccaccgagt

SEQ ID NO: 3626 - RNA, 21 nt, RNAi-sense strand
auuguacgcgccaccgaguuu

SEQ ID NO: 3627 - RNA, 21 nt, RNAi-antisense strand
acucgguggcgcguacaauuu

SEQ ID NO: 3628 - DNA, 21 bp, Homo sapiens
caccgagtgccttcaacacag

SEQ ID NO: 3629 - RNA, 21 nt, RNAi-sense strand
ccgagugccuucaacacaguu

SEQ ID NO: 3630 - RNA, 21 nt, RNAi-antisense strand
cuguguugaaggcacucgguu

SEQ ID NO: 3631 - DNA, 21 bp, Homo sapiens
caacacagcttgtctcttgcc

SEQ ID NO: 3632 - RNA, 21 nt, RNAi-sense strand
acacagcuugucucuugccuu

SEQ ID NO: 3633 - RNA, 21 nt, RNAi-antisense strand
ggcaagagacaagcuguguuu

SEQ ID NO: 3634 - DNA, 21 bp, Homo sapiens
cacagcttgtctcttgcctgc

SEQ ID NO: 3635 - RNA, 21 nt, RNAi-sense strand
cagcuugucucuugccugcuu

SEQ ID NO: 3636 - RNA, 21 nt, RNAi-antisense strand
gcaggcaagagacaagcuguu

SEQ ID NO: 3637 - DNA, 21 bp, Homo sapiens
cagcttgtctcttgcctgcca

SEQ ID NO: 3638 - RNA, 21 nt, RNAi-sense strand
gcuugucucuugccugccauu

SEQ ID NO: 3639 - RNA, 21 nt, RNAi-antisense strand
uggcaggcaagagacaagcuu

SEQ ID NO: 3640 - DNA, 21 bp, Homo sapiens
cactgtgtgaatcggcgacgg

SEQ ID NO: 3641 - RNA, 21 nt, RNAi-sense strand
cugugugaaucggcgacgguu

SEQ ID NO: 3642 - RNA, 21 nt, RNAi-antisense strand
ccgucgccgauucacacaguu

SEQ ID NO: 3643 - DNA, 21 bp, Homo sapiens
catttctcaggctaggccagc

SEQ ID NO: 3644 - RNA, 21 nt, RNAi-sense strand
uuucucaggcuaggccagcuu

SEQ ID NO: 3645 - RNA, 21 nt, RNAi-antisense strand
gcuggccuagccugagaaauu

SEQ ID NO: 3646 - DNA, 21 bp, Homo sapiens
catgcgatgacacttgtacaa

SEQ ID NO: 3647 - RNA, 21 nt, RNAi-sense strand
ugcgaugacacuuguacaauu

SEQ ID NO: 3648 - RNA, 21 nt, RNAi-antisense strand
uuguacaagugucaucgcauu

SEQ ID NO: 3649 - DNA, 21 bp, Homo sapiens
gacagattgattcactttgga

SEQ ID NO: 3650 - RNA, 21 nt, RNAi-sense strand
cagauugauucacuuuggauu

SEQ ID NO: 3651 - RNA, 21 nt, RNAi-antisense strand
uccaaagugaaucaaucuguu

SEQ ID NO: 3652 - DNA, 21 bp, Homo sapiens
gattgattcactttggagctg

SEQ ID NO: 3653 - RNA, 21 nt, RNAi-sense strand
uugauucacuuuggagcuguu

SEQ ID NO: 3654 - RNA, 21 nt, RNAi-antisense strand
cagcuccaaagugaaucaauu

SEQ ID NO: 3655 - DNA, 21 bp, Homo sapiens
gattcactttggagctgtaag

SEQ ID NO: 3656 - RNA, 21 nt, RNAi-sense strand
uucacuuuggagcuguaaguu

SEQ ID NO: 3657 - RNA, 21 nt, RNAi-antisense strand
cuuacagcuccaaagugaauu

SEQ ID NO: 3658 - DNA, 21 bp, Homo sapiens
gagctgtaagtactgatgtat

SEQ ID NO: 3659 - RNA, 21 nt, RNAi-sense strand
gcuguaaguacugauguauuu

SEQ ID NO: 3660 - RNA, 21 nt, RNAi-antisense strand
auacaucaguacuuacagcuu

SEQ ID NO: 3661 - DNA, 21 bp, Homo sapiens
gacctcggagcaagtttcacc

SEQ ID NO: 3662 - RNA, 21 nt, RNAi-sense strand
ccucggagcaaguuucaccuu

SEQ ID NO: 3663 - RNA, 21 nt, RNAi-antisense strand
ggugaaacuugcuccgagguu

SEQ ID NO: 3664 - DNA, 21 bp, Homo sapiens
gagcaagtttcaccgaagatg

SEQ ID NO: 3665 - RNA, 21 nt, RNAi-sense strand
gcaaguuucaccgaagauguu

SEQ ID NO: 3666 - RNA, 21 nt, RNAi-antisense strand
caucuucggugaaacuugcuu

SEQ ID NO: 3667 - DNA, 21 bp, Homo sapiens
gagaactggtgtccacagacc

SEQ ID NO: 3668 - RNA, 21 nt, RNAi-sense strand
gaacugguguccacagaccuu

SEQ ID NO: 3669 - RNA, 21 nt, RNAi-antisense strand
ggucuguggacaccaguucuu

SEQ ID NO: 3670 - DNA, 21 bp, Homo sapiens
gaaaggtgttggcattaaagg

SEQ ID NO: 3671 - RNA, 21 nt, RNAi-sense strand
aagguguuggcauuaaagguu

SEQ ID NO: 3672 - RNA, 21 nt, RNAi-antisense strand
ccuuuaaugccaacaccuuuu

SEQ ID NO: 3673 - DNA, 21 bp, Homo sapiens
gataagcctgttcaggacttt

SEQ ID NO: 3674 - RNA, 21 nt, RNAi-sense strand
uaagccuguucaggacuuuuu

SEQ ID NO: 3675 - RNA, 21 nt, RNAi-antisense strand
aaaguccugaacaggcuuauu

SEQ ID NO: 3676 - DNA, 21 bp, Homo sapiens
gacttgctggacttctggttt

SEQ ID NO: 3677 - RNA, 21 nt, RNAi-sense strand
cuugcuggacuucugguuuuu

SEQ ID NO: 3678 - RNA, 21 nt, RNAi-antisense strand
aaaccagaaguccagcaaguu

SEQ ID NO: 3679 - DNA, 21 bp, Homo sapiens
gacttctggtttgcctgcact

SEQ ID NO: 3680 - RNA, 21 nt, RNAi-sense strand
cuucugguuugccugcacuuu

SEQ ID NO: 3681 - RNA, 21 nt, RNAi-antisense strand
agugcaggcaaaccagaaguu

SEQ ID NO: 3682 - DNA, 21 bp, Homo sapiens
gactcgaacgaggagaagagg

SEQ ID NO: 3683 - RNA, 21 nt, RNAi-sense strand
cucgaacgaggagaagagguu

SEQ ID NO: 3684 - RNA, 21 nt, RNAi-antisense strand
ccucuucuccucguucgaguu

SEQ ID NO: 3685 - DNA, 21 bp, Homo sapiens
gaacgaggagaagaggctgaa

SEQ ID NO: 3686 - RNA, 21 nt, RNAi-sense strand
acgaggagaagaggcugaauu

SEQ ID NO: 3687 - RNA, 21 nt, RNAi-antisense strand
uucagccucuucuccucguuu

SEQ ID NO: 3688 - DNA, 21 bp, Homo sapiens
gaggagaagaggctgaagctg

SEQ ID NO: 3689 - RNA, 21 nt, RNAi-sense strand
ggagaagaggcugaagcuguu

SEQ ID NO: 3690 - RNA, 21 nt, RNAi-antisense strand
cagcuucagccucuucuccuu

SEQ ID NO: 3691 - DNA, 21 bp, Homo sapiens
gagaagaggctgaagctggcg

SEQ ID NO: 3692 - RNA, 21 nt, RNAi-sense strand
gaagaggcugaagcuggcguu

SEQ ID NO: 3693 - RNA, 21 nt, RNAi-antisense strand
cgccagcuucagccucuucuu

SEQ ID NO: 3694 - DNA, 21 bp, Homo sapiens
gaagaggctgaagctggcgag

SEQ ID NO: 3695 - RNA, 21 nt, RNAi-sense strand
agaggcugaagcuggcgaguu

SEQ ID NO: 3696 - RNA, 21 nt, RNAi-antisense strand
cucgccagcuucagccucuuu

SEQ ID NO: 3697 - DNA, 21 bp, Homo sapiens
gaagctggcgagagccatcta

SEQ ID NO: 3698 - RNA, 21 nt, RNAi-sense strand
agcuggcgagagccaucuauu

SEQ ID NO: 3699 - RNA, 21 nt, RNAi-antisense strand
uagauggcucucgccagcuuu

SEQ ID NO: 3700 - DNA, 21 bp, Homo sapiens
gagagccatctaccgaaagta

SEQ ID NO: 3701 - RNA, 21 nt, RNAi-sense strand
gagccaucuaccgaaaguauu

SEQ ID NO: 3702 - RNA, 21 nt, RNAi-antisense strand
uacuuucgguagauggcucuu

SEQ ID NO: 3703 - DNA, 21 bp, Homo sapiens
gagccatctaccgaaagtaca

SEQ ID NO: 3704 - RNA, 21 nt, RNAi-sense strand
gccaucuaccgaaaguacauu

SEQ ID NO: 3705 - RNA, 21 nt, RNAi-antisense strand
uguacuuucgguagauggcuu

SEQ ID NO: 3706 - DNA, 21 bp, Homo sapiens
gataacaatggcatcgtgtcc

SEQ ID NO: 3707 - RNA, 21 nt, RNAi-sense strand
uaacaauggcaucguguccuu

SEQ ID NO: 3708 - RNA, 21 nt, RNAi-antisense strand
ggacacgaugccauuguuauu

SEQ ID NO: 3709 - DNA, 21 bp, Homo sapiens
gaccaagccagccaccaagag

SEQ ID NO: 3710 - RNA, 21 nt, RNAi-sense strand
ccaagccagccaccaagaguu

SEQ ID NO: 3711 - RNA, 21 nt, RNAi-antisense strand
cucuugguggcuggcuugguu

SEQ ID NO: 3712 - DNA, 21 bp, Homo sapiens
gaagcagctgatcgatcctgc

SEQ ID NO: 3713 - RNA, 21 nt, RNAi-sense strand
agcagcugaucgauccugcuu

SEQ ID NO: 3714 - RNA, 21 nt, RNAi-antisense strand
gcaggaucgaucagcugcuuu

SEQ ID NO: 3715 - DNA, 21 bp, Homo sapiens
gatcgatcctgccatgtttga

SEQ ID NO: 3716 - RNA, 21 nt, RNAi-sense strand
ucgauccugccauguuugauu

SEQ ID NO: 3717 - RNA, 21 nt, RNAi-antisense strand
ucaaacauggcaggaucgauu

SEQ ID NO: 3718 - DNA, 21 bp, Homo sapiens
gatcctgccatgtttgaccag

SEQ ID NO: 3719 - RNA, 21 nt, RNAi-sense strand
uccugccauguuugaccaguu

SEQ ID NO: 3720 - RNA, 21 nt, RNAi-antisense strand
cuggucaaacauggcaggauu

SEQ ID NO: 3721 - DNA, 21 bp, Homo sapiens
gaccgaaatccaggccactat

SEQ ID NO: 3722 - RNA, 21 nt, RNAi-sense strand
ccgaaauccaggccacuauuu

SEQ ID NO: 3723 - RNA, 21 nt, RNAi-antisense strand
auaguggccuggauuucgguu

SEQ ID NO: 3724 - DNA, 21 bp, Homo sapiens
gaaatccaggccactatggag

SEQ ID NO: 3725 - RNA, 21 nt, RNAi-sense strand
aauccaggccacuauggaguu

SEQ ID NO: 3726 - RNA, 21 nt, RNAi-antisense strand
cuccauaguggccuggauuuu

SEQ ID NO: 3727 - DNA, 21 bp, Homo sapiens
gaatatacgaggacaggctcg

SEQ ID NO: 3728 - RNA, 21 nt, RNAi-sense strand
auauacgaggacaggcucguu

SEQ ID NO: 3729 - RNA, 21 nt, RNAi-antisense strand
cgagccuguccucguauauuu

SEQ ID NO: 3730 - DNA, 21 bp, Homo sapiens
gatacctgccgaccttaaatg

SEQ ID NO: 3731 - RNA, 21 nt, RNAi-sense strand
uaccugccgaccuuaaauguu

SEQ ID NO: 3732 - RNA, 21 nt, RNAi-antisense strand
cauuuaaggucggcagguauu

SEQ ID NO: 3733 - DNA, 21 bp, Homo sapiens
gaccttaaatgaagatgagga

SEQ ID NO: 3734 - RNA, 21 nt, RNAi-sense strand
ccuuaaaugaagaugaggauu

SEQ ID NO: 3735 - RNA, 21 nt, RNAi-antisense strand
uccucaucuucauuuaagguu

SEQ ID NO: 3736 - DNA, 21 bp, Homo sapiens
gaagatgaggaatggaagtgt

SEQ ID NO: 3737 - RNA, 21 nt, RNAi-sense strand
agaugaggaauggaaguguuu

SEQ ID NO: 3738 - RNA, 21 nt, RNAi-antisense strand
acacuuccauuccucaucuuu

SEQ ID NO: 3739 - DNA, 21 bp, Homo sapiens
gatgaggaatggaagtgtgac

SEQ ID NO: 3740 - RNA, 21 nt, RNAi-sense strand
ugaggaauggaagugugacuu

SEQ ID NO: 3741 - RNA, 21 nt, RNAi-antisense strand
gucacacuuccauuccucauu

SEQ ID NO: 3742 - DNA, 21 bp, Homo sapiens
gaggaatggaagtgtgaccag

SEQ ID NO: 3743 - RNA, 21 nt, RNAi-sense strand
ggaauggaagugugaccaguu

SEQ ID NO: 3744 - RNA, 21 nt, RNAi-antisense strand
cuggucacacuuccauuccuu

SEQ ID NO: 3745 - DNA, 21 bp, Homo sapiens
gaatggaagtgtgaccaggac

SEQ ID NO: 3746 - RNA, 21 nt, RNAi-sense strand
auggaagugugaccaggacuu

SEQ ID NO: 3747 - RNA, 21 nt, RNAi-antisense strand
guccuggucacacuuccauuu

SEQ ID NO: 3748 - DNA, 21 bp, Homo sapiens
gaagtgtgaccaggacatgga

SEQ ID NO: 3749 - RNA, 21 nt, RNAi-sense strand
agugugaccaggacauggauu

SEQ ID NO: 3750 - RNA, 21 nt, RNAi-antisense strand
uccauguccuggucacacuuu

SEQ ID NO: 3751 - DNA, 21 bp, Homo sapiens
gaccaggacatggatgaggac

SEQ ID NO: 3752 - RNA, 21 nt, RNAi-sense strand
ccaggacauggaugaggacuu

SEQ ID NO: 3753 - RNA, 21 nt, RNAi-antisense strand
guccucauccauguccugguu

SEQ ID NO: 3754 - DNA, 21 bp, Homo sapiens
gacatggatgaggacgatggc

SEQ ID NO: 3755 - RNA, 21 nt, RNAi-sense strand
cauggaugaggacgauggcuu

SEQ ID NO: 3756 - RNA, 21 nt, RNAi-antisense strand
gccaucguccucauccauguu

SEQ ID NO: 3757 - DNA, 21 bp, Homo sapiens
gatgaggacgatggcagagac

SEQ ID NO: 3758 - RNA, 21 nt, RNAi-sense strand
ugaggacgauggcagagacuu

SEQ ID NO: 3759 - RNA, 21 nt, RNAi-antisense strand
gucucugccaucguccucauu

SEQ ID NO: 3760 - DNA, 21 bp, Homo sapiens
gaggacgatggcagagacgct

SEQ ID NO: 3761 - RNA, 21 nt, RNAi-sense strand
ggacgauggcagagacgcuuu

SEQ ID NO: 3762 - RNA, 21 nt, RNAi-antisense strand
agcgucucugccaucguccuu

SEQ ID NO: 3763 - DNA, 21 bp, Homo sapiens
gacgatggcagagacgctgct

SEQ ID NO: 3764 - RNA, 21 nt, RNAi-sense strand
cgauggcagagacgcugcuuu

SEQ ID NO: 3765 - RNA, 21 nt, RNAi-antisense strand
agcagcgucucugccaucguu

SEQ ID NO: 3766 - DNA, 21 bp, Homo sapiens
gaagctgctcctggagacagc

SEQ ID NO: 3767 - RNA, 21 nt, RNAi-sense strand
agcugcuccuggagacagcuu

SEQ ID NO: 3768 - RNA, 21 nt, RNAi-antisense strand
gcugucuccaggagcagcuuu

SEQ ID NO: 3769 - DNA, 21 bp, Homo sapiens
gacggtacagcgaaggcagag

SEQ ID NO: 3770 - RNA, 21 nt, RNAi-sense strand
cgguacagcgaaggcagaguu

SEQ ID NO: 3771 - RNA, 21 nt, RNAi-antisense strand
cucugccuucgcuguaccguu

SEQ ID NO: 3772 - DNA, 21 bp, Homo sapiens
gaaggcagagagttcaggtat

SEQ ID NO: 3773 - RNA, 21 nt, RNAi-sense strand
aggcagagaguucagguauuu

SEQ ID NO: 3774 - RNA, 21 nt, RNAi-antisense strand
auaccugaacucucugccuuu

SEQ ID NO: 3775 - DNA, 21 bp, Homo sapiens
gagagttcaggtatggatcct

SEQ ID NO: 3776 - RNA, 21 nt, RNAi-sense strand
gaguucagguauggauccuuu

SEQ ID NO: 3777 - RNA, 21 nt, RNAi-antisense strand
aggauccauaccugaacucuu

SEQ ID NO: 3778 - DNA, 21 bp, Homo sapiens
gagttcaggtatggatcctgg

SEQ ID NO: 3779 - RNA, 21 nt, RNAi-sense strand
guucagguauggauccugguu

SEQ ID NO: 3780 - RNA, 21 nt, RNAi-antisense strand
ccaggauccauaccugaacuu

SEQ ID NO: 3781 - DNA, 21 bp, Homo sapiens
gagcctgtccagcgatgcaga

SEQ ID NO: 3782 - RNA, 21 nt, RNAi-sense strand
gccuguccagcgaugcagauu

SEQ ID NO: 3783 - RNA, 21 nt, RNAi-antisense strand
ucugcaucgcuggacaggcuu

SEQ ID NO: 3784 - DNA, 21 bp, Homo sapiens
gatccgtaagcagcaccgcag

SEQ ID NO: 3785 - RNA, 21 nt, RNAi-sense strand
uccguaagcagcaccgcaguu

SEQ ID NO: 3786 - RNA, 21 nt, RNAi-antisense strand
cugcggugcugcuuacggauu

SEQ ID NO: 3787 - DNA, 21 bp, Homo sapiens
gagatgcaggagagcgtgcag

SEQ ID NO: 3788 - RNA, 21 nt, RNAi-sense strand
gaugcaggagagcgugcaguu

SEQ ID NO: 3789 - RNA, 21 nt, RNAi-antisense strand
cugcacgcucuccugcaucuu

SEQ ID NO: 3790 - DNA, 21 bp, Homo sapiens
gatgcaggagagcgtgcaggt

SEQ ID NO: 3791 - RNA, 21 nt, RNAi-sense strand
ugcaggagagcgugcagguuu

SEQ ID NO: 3792 - RNA, 21 nt, RNAi-antisense strand
accugcacgcucuccugcauu

SEQ ID NO: 3793 - DNA, 21 bp, Homo sapiens
gagcctcagaagttcgcggag

SEQ ID NO: 3794 - RNA, 21 nt, RNAi-sense strand
gccucagaaguucgcggaguu

SEQ ID NO: 3795 - RNA, 21 nt, RNAi-antisense strand
cuccgcgaacuucugaggcuu

SEQ ID NO: 3796 - DNA, 21 bp, Homo sapiens
gaagttcgcggaggagctcat

SEQ ID NO: 3797 - RNA, 21 nt, RNAi-sense strand
aguucgcggaggagcucauuu

SEQ ID NO: 3798 - RNA, 21 nt, RNAi-antisense strand
augagcuccuccgcgaacuuu

SEQ ID NO: 3799 - DNA, 21 bp, Homo sapiens
gaagctggaggagcggctgaa

SEQ ID NO: 3800 - RNA, 21 nt, RNAi-sense strand
agcuggaggagcggcugaauu

SEQ ID NO: 3801 - RNA, 21 nt, RNAi-antisense strand
uucagccgcuccuccagcuuu

SEQ ID NO: 3802 - DNA, 21 bp, Homo sapiens
gaggaaggtgaggacggcgat

SEQ ID NO: 3803 - RNA, 21 nt, RNAi-sense strand
ggaaggugaggacggcgauuu

SEQ ID NO: 3804 - RNA, 21 nt, RNAi-antisense strand
aucgccguccucaccuuccuu

SEQ ID NO: 3805 - DNA, 21 bp, Homo sapiens
gaaggtgaggacggcgatcca

SEQ ID NO: 3806 - RNA, 21 nt, RNAi-sense strand
aggugaggacggcgauccauu

SEQ ID NO: 3807 - RNA, 21 nt, RNAi-antisense strand
uggaucgccguccucaccuuu

SEQ ID NO: 3808 - DNA, 21 bp, Homo sapiens
gaggacggcgatccatcgtca

SEQ ID NO: 3809 - RNA, 21 nt, RNAi-sense strand
ggacggcgauccaucgucauu

SEQ ID NO: 3810 - RNA, 21 nt, RNAi-antisense strand
ugacgauggaucgccguccuu

SEQ ID NO: 3811 - DNA, 21 bp, Homo sapiens
gagagcatcctggacgagcac

SEQ ID NO: 3812 - RNA, 21 nt, RNAi-sense strand
gagcauccuggacgagcacuu

SEQ ID NO: 3813 - RNA, 21 nt, RNAi-antisense strand
gugcucguccaggaugcucuu

SEQ ID NO: 3814 - DNA, 21 bp, Homo sapiens
gagcatcctggacgagcacgt

SEQ ID NO: 3815 - RNA, 21 nt, RNAi-sense strand
gcauccuggacgagcacguuu

SEQ ID NO: 3816 - RNA, 21 nt, RNAi-antisense strand
acgugcucguccaggaugcuu

SEQ ID NO: 3817 - DNA, 21 bp, Homo sapiens
gacgagcacgtacagcgtgtg

SEQ ID NO: 3818 - RNA, 21 nt, RNAi-sense strand
cgagcacguacagcguguguu

SEQ ID NO: 3819 - RNA, 21 nt, RNAi-antisense strand
cacacgcuguacgugcucguu

SEQ ID NO: 3820 - DNA, 21 bp, Homo sapiens
gagcacgtacagcgtgtgctg

SEQ ID NO: 3821 - RNA, 21 nt, RNAi-sense strand
gcacguacagcgugugcuguu

SEQ ID NO: 3822 - RNA, 21 nt, RNAi-antisense strand
cagcacacgcuguacgugcuu

SEQ ID NO: 3823 - DNA, 21 bp, Homo sapiens
gaggctactcagagagtgttg

SEQ ID NO: 3824 - RNA, 21 nt, RNAi-sense strand
ggcuacucagagaguguuguu

SEQ ID NO: 3825 - RNA, 21 nt, RNAi-antisense strand
caacacucucugaguagccuu

SEQ ID NO: 3826 - DNA, 21 bp, Homo sapiens
gaaatgccaagaaggctgagt

SEQ ID NO: 3827 - RNA, 21 nt, RNAi-sense strand
aaugccaagaaggcugaguuu

SEQ ID NO: 3828 - RNA, 21 nt, RNAi-antisense strand
acucagccuucuuggcauuuu

SEQ ID NO: 3829 - DNA, 21 bp, Homo sapiens
gaggatgcggagaagaaccag

SEQ ID NO: 3830 - RNA, 21 nt, RNAi-sense strand
ggaugcggagaagaaccaguu

SEQ ID NO: 3831 - RNA, 21 nt, RNAi-antisense strand
cugguucuucuccgcauccuu

SEQ ID NO: 3832 - DNA, 21 bp, Homo sapiens
gatgcggagaagaaccagaaa

SEQ ID NO: 3833 - RNA, 21 nt, RNAi-sense strand
ugcggagaagaaccagaaauu

SEQ ID NO: 3834 - RNA, 21 nt, RNAi-antisense strand
uuucugguucuucuccgcauu

SEQ ID NO: 3835 - DNA, 21 bp, Homo sapiens
gacgtctggaggaggaagaaa

SEQ ID NO: 3836 - RNA, 21 nt, RNAi-sense strand
cgucuggaggaggaagaaauu

SEQ ID NO: 3837 - RNA, 21 nt, RNAi-antisense strand
uuucuuccuccuccagacguu

SEQ ID NO: 3838 - DNA, 21 bp, Homo sapiens
gaggacaagatcgcagaggaa

SEQ ID NO: 3839 - RNA, 21 nt, RNAi-sense strand
ggacaagaucgcagaggaauu

SEQ ID NO: 3840 - RNA, 21 nt, RNAi-antisense strand
uuccucugcgaucuuguccuu

SEQ ID NO: 3841 - DNA, 21 bp, Homo sapiens
gacaagatcgcagaggaaggt

SEQ ID NO: 3842 - RNA, 21 nt, RNAi-sense strand
caagaucgcagaggaagguuu

SEQ ID NO: 3843 - RNA, 21 nt, RNAi-antisense strand
accuuccucugcgaucuuguu

SEQ ID NO: 3844 - DNA, 21 bp, Homo sapiens
gacagcatcgttgtggcgtac

SEQ ID NO: 3845 - RNA, 21 nt, RNAi-sense strand
cagcaucguuguggcguacuu

SEQ ID NO: 3846 - RNA, 21 nt, RNAi-antisense strand
guacgccacaacgaugcuguu

SEQ ID NO: 3847 - DNA, 21 bp, Homo sapiens
gatactacttcaagaaagtga

SEQ ID NO: 3848 - RNA, 21 nt, RNAi-sense strand
uacuacuucaagaaagugauu

SEQ ID NO: 3849 - RNA, 21 nt, RNAi-antisense strand
ucacuuucuugaaguaguauu

SEQ ID NO: 3850 - DNA, 21 bp, Homo sapiens
gaaagtgagcgacgagtttga

SEQ ID NO: 3851 - RNA, 21 nt, RNAi-sense strand
aagugagcgacgaguuugauu

SEQ ID NO: 3852 - RNA, 21 nt, RNAi-antisense strand
ucaaacucgucgcucacuuuu

SEQ ID NO: 3853 - DNA, 21 bp, Homo sapiens
gagcgacgagtttgactgtgg

SEQ ID NO: 3854 - RNA, 21 nt, RNAi-sense strand
gcgacgaguuugacugugguu

SEQ ID NO: 3855 - RNA, 21 nt, RNAi-antisense strand
ccacagucaaacucgucgcuu

SEQ ID NO: 3856 - DNA, 21 bp, Homo sapiens
gaggaggttcgagaggacgag

SEQ ID NO: 3857 - RNA, 21 nt, RNAi-sense strand
ggagguucgagaggacgaguu

SEQ ID NO: 3858 - RNA, 21 nt, RNAi-antisense strand
cucguccucucgaaccuccuu

SEQ ID NO: 3859 - DNA, 21 bp, Homo sapiens
gaggagaagatcatcggcaaa

SEQ ID NO: 3860 - RNA, 21 nt, RNAi-sense strand
ggagaagaucaucggcaaauu

SEQ ID NO: 3861 - RNA, 21 nt, RNAi-antisense strand
uuugccgaugaucuucuccuu

SEQ ID NO: 3862 - DNA, 21 bp, Homo sapiens
gagaagatcatcggcaaagtg

SEQ ID NO: 3863 - RNA, 21 nt, RNAi-sense strand
gaagaucaucggcaaaguguu

SEQ ID NO: 3864 - RNA, 21 nt, RNAi-antisense strand
cacuuugccgaugaucuucuu

SEQ ID NO: 3865 - DNA, 21 bp, Homo sapiens
gaagatcatcggcaaagtgga

SEQ ID NO: 3866 - RNA, 21 nt, RNAi-sense strand
agaucaucggcaaaguggauu

SEQ ID NO: 3867 - RNA, 21 nt, RNAi-antisense strand
uccacuuugccgaugaucuuu

SEQ ID NO: 3868 - DNA, 21 bp, Homo sapiens
gatcatcggcaaagtggagaa

SEQ ID NO: 3869 - RNA, 21 nt, RNAi-sense strand
ucaucggcaaaguggagaauu

SEQ ID NO: 3870 - RNA, 21 nt, RNAi-antisense strand
uucuccacuuugccgaugauu

SEQ ID NO: 3871 - DNA, 21 bp, Homo sapiens
gagaaggtggactgataggct

SEQ ID NO: 3872 - RNA, 21 nt, RNAi-sense strand
gaagguggacugauaggcuuu

SEQ ID NO: 3873 - RNA, 21 nt, RNAi-antisense strand
agccuaucaguccaccuucuu

SEQ ID NO: 3874 - DNA, 21 bp, Homo sapiens
gaaggtggactgataggctgg

SEQ ID NO: 3875 - RNA, 21 nt, RNAi-sense strand
agguggacugauaggcugguu

SEQ ID NO: 3876 - RNA, 21 nt, RNAi-antisense strand
ccagccuaucaguccaccuuu

SEQ ID NO: 3877 - DNA, 21 bp, Homo sapiens
gatgacctcgtactcaggagc

SEQ ID NO: 3878 - RNA, 21 nt, RNAi-sense strand
ugaccucguacucaggagcuu

SEQ ID NO: 3879 - RNA, 21 nt, RNAi-antisense strand
gcuccugaguacgaggucauu

SEQ ID NO: 3880 - DNA, 21 bp, Homo sapiens
gaccactcctcatagcaatac

SEQ ID NO: 3881 - RNA, 21 nt, RNAi-sense strand
ccacuccucauagcaauacuu

SEQ ID NO: 3882 - RNA, 21 nt, RNAi-antisense strand
guauugcuaugaggagugguu

SEQ ID NO: 3883 - DNA, 21 bp, Homo sapiens
gagtgccttcaacacagcttg

SEQ ID NO: 3884 - RNA, 21 nt, RNAi-sense strand
gugccuucaacacagcuuguu

SEQ ID NO: 3885 - RNA, 21 nt, RNAi-antisense strand
caagcuguguugaaggcacuu

SEQ ID NO: 3886 - DNA, 21 bp, Homo sapiens
taaaggtgagacttcgacggc

SEQ ID NO: 3887 - RNA, 21 nt, RNAi-sense strand
aaggugagacuucgacggcuu

SEQ ID NO: 3888 - RNA, 21 nt, RNAi-antisense strand
gccgucgaagucucaccuuuu

SEQ ID NO: 3889 - DNA, 21 bp, Homo sapiens
taagcctgttcaggactttcc

SEQ ID NO: 3890 - RNA, 21 nt, RNAi-sense strand
agccuguucaggacuuuccuu

SEQ ID NO: 3891 - RNA, 21 nt, RNAi-antisense strand
ggaaaguccugaacaggcuuu

SEQ ID NO: 3892 - DNA, 21 bp, Homo sapiens
taccgaaagtacattcttgat

SEQ ID NO: 3893 - RNA, 21 nt, RNAi-sense strand
ccgaaaguacauucuugauuu

SEQ ID NO: 3894 - RNA, 21 nt, RNAi-antisense strand
aucaagaauguacuuucgguu

SEQ ID NO: 3895 - DNA, 21 bp, Homo sapiens
tacattcttgataacaatggc

SEQ ID NO: 3896 - RNA, 21 nt, RNAi-sense strand
cauucuugauaacaauggcuu

SEQ ID NO: 3897 - RNA, 21 nt, RNAi-antisense strand
gccauuguuaucaagaauguu

SEQ ID NO: 3898 - DNA, 21 bp, Homo sapiens
tatttggaatatacgaggaca

SEQ ID NO: 3899 - RNA, 21 nt, RNAi-sense strand
uuuggaauauacgaggacauu

SEQ ID NO: 3900 - RNA, 21 nt, RNAi-antisense strand
uguccucguauauuccaaauu

SEQ ID NO: 3901 - DNA, 21 bp, Homo sapiens
tatacgaggacaggctcggag

SEQ ID NO: 3902 - RNA, 21 nt, RNAi-sense strand
uacgaggacaggcucggaguu

SEQ ID NO: 3903 - RNA, 21 nt, RNAi-antisense strand
cuccgagccuguccucguauu

SEQ ID NO: 3904 - DNA, 21 bp, Homo sapiens
tacgaggacaggctcggagag

SEQ ID NO: 3905 - RNA, 21 nt, RNAi-sense strand
cgaggacaggcucggagaguu

SEQ ID NO: 3906 - RNA, 21 nt, RNAi-antisense strand
cucuccgagccuguccucguu

SEQ ID NO: 3907 - DNA, 21 bp, Homo sapiens
tatctggatacctgccgacct

SEQ ID NO: 3908 - RNA, 21 nt, RNAi-sense strand
ucuggauaccugccgaccuuu

SEQ ID NO: 3909 - RNA, 21 nt, RNAi-antisense strand
aggucggcagguauccagauu

SEQ ID NO: 3910 - DNA, 21 bp, Homo sapiens
tacctgccgaccttaaatgaa

SEQ ID NO: 3911 - RNA, 21 nt, RNAi-sense strand
ccugccgaccuuaaaugaauu

SEQ ID NO: 3912 - RNA, 21 nt, RNAi-antisense strand
uucauuuaaggucggcagguu

SEQ ID NO: 3913 - DNA, 21 bp, Homo sapiens
taaatgaagatgaggaatgga

SEQ ID NO: 3914 - RNA, 21 nt, RNAi-sense strand
aaugaagaugaggaauggauu

SEQ ID NO: 3915 - RNA, 21 nt, RNAi-antisense strand
uccauuccucaucuucauuuu

SEQ ID NO: 3916 - DNA, 21 bp, Homo sapiens
tagacggtacagcgaaggcag

SEQ ID NO: 3917 - RNA, 21 nt, RNAi-sense strand
gacgguacagcgaaggcaguu

SEQ ID NO: 3918 - RNA, 21 nt, RNAi-antisense strand
cugccuucgcuguaccgucuu

SEQ ID NO: 3919 - DNA, 21 bp, Homo sapiens
tacagcgaaggcagagagttc

SEQ ID NO: 3920 - RNA, 21 nt, RNAi-sense strand
cagcgaaggcagagaguucuu

SEQ ID NO: 3921 - RNA, 21 nt, RNAi-antisense strand
gaacucucugccuucgcuguu

SEQ ID NO: 3922 - DNA, 21 bp, Homo sapiens
tattatgtcaatgccggctat

SEQ ID NO: 3923 - RNA, 21 nt, RNAi-sense strand
uuaugucaaugccggcuauuu

SEQ ID NO: 3924 - RNA, 21 nt, RNAi-antisense strand
auagccggcauugacauaauu

SEQ ID NO: 3925 - DNA, 21 bp, Homo sapiens
tatgtcaatgccggctatgcc

SEQ ID NO: 3926 - RNA, 21 nt, RNAi-sense strand
ugucaaugccggcuaugccuu

SEQ ID NO: 3927 - RNA, 21 nt, RNAi-antisense strand
ggcauagccggcauugacauu

SEQ ID NO: 3928 - DNA, 21 bp, Homo sapiens
tacaggatccgtaagcagcac

SEQ ID NO: 3929 - RNA, 21 nt, RNAi-sense strand
caggauccguaagcagcacuu

SEQ ID NO: 3930 - RNA, 21 nt, RNAi-antisense strand
gugcugcuuacggauccuguu

SEQ ID NO: 3931 - DNA, 21 bp, Homo sapiens
tacagcgtgtgctgaggacac

SEQ ID NO: 3932 - RNA, 21 nt, RNAi-sense strand
cagcgugugcugaggacacuu

SEQ ID NO: 3933 - RNA, 21 nt, RNAi-antisense strand
guguccucagcacacgcuguu

SEQ ID NO: 3934 - DNA, 21 bp, Homo sapiens
tactcagagagtgttggcgct

SEQ ID NO: 3935 - RNA, 21 nt, RNAi-sense strand
cucagagaguguuggcgcuuu

SEQ ID NO: 3936 - RNA, 21 nt, RNAi-antisense strand
agcgccaacacucucugaguu

SEQ ID NO: 3937 - DNA, 21 bp, Homo sapiens
tactacttcaagaaagtgagc

SEQ ID NO: 3938 - RNA, 21 nt, RNAi-sense strand
cuacuucaagaaagugagcuu

SEQ ID NO: 3939 - RNA, 21 nt, RNAi-antisense strand
gcucacuuucuugaaguaguu

SEQ ID NO: 3940 - DNA, 21 bp, Homo sapiens
tacttcaagaaagtgagcgac

SEQ ID NO: 3941 - RNA, 21 nt, RNAi-sense strand
cuucaagaaagugagcgacuu

SEQ ID NO: 3942 - RNA, 21 nt, RNAi-antisense strand
gucgcucacuuucuugaaguu

SEQ ID NO: 3943 - DNA, 21 bp, Homo sapiens
tatgtacatttctcaggctag

SEQ ID NO: 3944 - RNA, 21 nt, RNAi-sense strand
uguacauuucucaggcuaguu

SEQ ID NO: 3945 - RNA, 21 nt, RNAi-antisense strand
cuagccugagaaauguacauu

SEQ ID NO: 3946 - DNA, 21 bp, Homo sapiens
tacatttctcaggctaggcca

SEQ ID NO: 3947 - RNA, 21 nt, RNAi-sense strand
cauuucucaggcuaggccauu

SEQ ID NO: 3948 - RNA, 21 nt, RNAi-antisense strand
uggccuagccugagaaauguu

SEQ ID NO: 3949 - DNA, 21 bp, Homo sapiens
aagtttcaccgaagatgctcc

SEQ ID NO: 3950 - RNA, 21 nt, RNAi-sense strand
guuucaccgaagaugcuccuu

SEQ ID NO: 3951 - RNA, 21 nt, RNAi-antisense strand
ggagcaucuucggugaaacuu

SEQ ID NO: 3952 - DNA, 21 bp, Homo sapiens
cattgttccttgacgcagagt

SEQ ID NO: 3953 - RNA, 21 nt, RNAi-sense strand
uuguuccuugacgcagaguuu

SEQ ID NO: 3954 - RNA, 21 nt, RNAi-antisense strand
acucugcgucaaggaacaauu

SEQ ID NO: 3955 - DNA, 21 bp, Homo sapiens
caagtttcaccgaagatgctc

SEQ ID NO: 3956 - RNA, 21 nt, RNAi-sense strand
aguuucaccgaagaugcucuu

SEQ ID NO: 3957 - RNA, 21 nt, RNAi-antisense strand
gagcaucuucggugaaacuuu

SEQ ID NO: 3958 - DNA, 21 bp, Homo sapiens
cattaaaggtgagacttcgac

SEQ ID NO: 3959 - RNA, 21 nt, RNAi-sense strand
uuaaaggugagacuucgacuu

SEQ ID NO: 3960 - RNA, 21 nt, RNAi-antisense strand
gucgaagucucaccuuuaauu

SEQ ID NO: 3961 - DNA, 21 bp, Homo sapiens
catatctggatacctgccgac

SEQ ID NO: 3962 - RNA, 21 nt, RNAi-sense strand
uaucuggauaccugccgacuu

SEQ ID NO: 3963 - RNA, 21 nt, RNAi-antisense strand
gucggcagguauccagauauu

SEQ ID NO: 3964 - DNA, 21 bp, Homo sapiens
gagcaagtttcaccgaagatg

SEQ ID NO: 3965 - RNA, 21 nt, RNAi-sense strand
gcaaguuucaccgaagauguu

SEQ ID NO: 3966 - RNA, 21 nt, RNAi-antisense strand
caucuucggugaaacuugcuu

SEQ ID NO: 3967 - DNA, 21 bp, Homo sapiens
gaaaggtgttggcattaaagg

SEQ ID NO: 3968 - RNA, 21 nt, RNAi-sense strand
aagguguuggcauuaaagguu

SEQ ID NO: 3969 - RNA, 21 nt, RNAi-antisense strand
ccuuuaaugccaacaccuuuu

SEQ ID NO: 3970 - DNA, 21 bp, Homo sapiens
gagagccatctaccgaaagta

SEQ ID NO: 3971 - RNA, 21 nt, RNAi-sense strand
gagccaucuaccgaaaguauu

SEQ ID NO: 3972 - RNA, 21 nt, RNAi-antisense strand
uacuuucgguagauggcucuu

SEQ ID NO: 3973 - DNA, 21 bp, Homo sapiens
gagccatctaccgaaagtaca

SEQ ID NO: 3974 - RNA, 21 nt, RNAi-sense strand
gccaucuaccgaaaguacauu

SEQ ID NO: 3975 - RNA, 21 nt, RNAi-antisense strand
uguacuuucgguagauggcuu

SEQ ID NO: 3976 - DNA, 21 bp, Homo sapiens
gataacaatggcatcgtgtcc

SEQ ID NO: 3977 - RNA, 21 nt, RNAi-sense strand
uaacaauggcaucguguccuu

SEQ ID NO: 3978 - RNA, 21 nt, RNAi-antisense strand
ggacacgaugccauuguuauu

SEQ ID NO: 3979 - DNA, 21 bp, Homo sapiens
gaccgaaatccaggccactat

SEQ ID NO: 3980 - RNA, 21 nt, RNAi-sense strand
ccgaaauccaggccacuauuu

SEQ ID NO: 3981 - RNA, 21 nt, RNAi-antisense strand
auaguggccuggauuucgguu

SEQ ID NO: 3982 - DNA, 21 bp, Homo sapiens
gaaatccaggccactatggag

SEQ ID NO: 3983 - RNA, 21 nt, RNAi-sense strand
aauccaggccacuauggaguu

SEQ ID NO: 3984 - RNA, 21 nt, RNAi-antisense strand
cuccauaguggccuggauuuu

SEQ ID NO: 3985 - DNA, 21 bp, Homo sapiens
gatacctgccgaccttaaatg

SEQ ID NO: 3986 - RNA, 21 nt, RNAi-sense strand
uaccugccgaccuuaaauguu

SEQ ID NO: 3987 - RNA, 21 nt, RNAi-antisense strand
cauuuaaggucggcagguauu

SEQ ID NO: 3988 - DNA, 21 bp, Homo sapiens
tatttggaatatacgaggaca

SEQ ID NO: 3989 - RNA, 21 nt, RNAi-sense strand
uuuggaauauacgaggacauu

SEQ ID NO: 3990 - RNA, 21 nt, RNAi-antisense strand
uguccucguauauuccaaauu

SEQ ID NO: 3991 - DNA, 21 bp, Homo sapiens
tattatgtcaatgccggctat

SEQ ID NO: 3992 - RNA, 21 nt, RNAi-sense strand
uuaugucaaugccggcuauuu

SEQ ID NO: 3993 - RNA, 21 nt, RNAi-antisense strand
auagccggcauugacauaauu

SEQ ID NO: 3994 - DNA, 21 bp, Homo sapiens
aaatgaatatccaagagcagg

SEQ ID NO: 3995 - RNA, 21 nt, RNAi-sense strand
augaauauccaagagcagguu

SEQ ID NO: 3996 - RNA, 21 nt, RNAi-antisense strand
ccugcucuuggauauucauuu

SEQ ID NO: 3997 - DNA, 21 bp, Homo sapiens
aagtttcaccgaagatgctcc

SEQ ID NO: 3998 - RNA, 21 nt, RNAi-sense strand
guuucaccgaagaugcuccuu

SEQ ID NO: 3999 - RNA, 21 nt, RNAi-antisense strand
ggagcaucuucggugaaacuu

SEQ ID NO: 4000 - DNA, 21 bp, Homo sapiens
aaaggtgttggcattaaaggt

SEQ ID NO: 4001 - RNA, 21 nt, RNAi-sense strand
agguguuggcauuaaagguuu

SEQ ID NO: 4002 - RNA, 21 nt, RNAi-antisense strand
accuuuaaugccaacaccuuu

SEQ ID NO: 4003 - DNA, 21 bp, Homo sapiens
aaggtgttggcattaaaggtg

SEQ ID NO: 4004 - RNA, 21 nt, RNAi-sense strand
gguguuggcauuaaagguguu

SEQ ID NO: 4005 - RNA, 21 nt, RNAi-antisense strand
caccuuuaaugccaacaccuu

SEQ ID NO: 4006 - DNA, 21 bp, Homo sapiens
aaaggtgagacttcgacggcc

SEQ ID NO: 4007 - RNA, 21 nt, RNAi-sense strand
aggugagacuucgacggccuu

SEQ ID NO: 4008 - RNA, 21 nt, RNAi-antisense strand
ggccgucgaagucucaccuuu

SEQ ID NO: 4009 - DNA, 21 bp, Homo sapiens
aaggtgagacttcgacggcca

SEQ ID NO: 4010 - RNA, 21 nt, RNAi-sense strand
ggugagacuucgacggccauu

SEQ ID NO: 4011 - RNA, 21 nt, RNAi-antisense strand
uggccgucgaagucucaccuu

SEQ ID NO: 4012 - DNA, 21 bp, Homo sapiens
aagcctgttcaggactttcct

SEQ ID NO: 4013 - RNA, 21 nt, RNAi-sense strand
gccuguucaggacuuuccuuu

SEQ ID NO: 4014 - RNA, 21 nt, RNAi-antisense strand
aggaaaguccugaacaggcuu

SEQ ID NO: 4015 - DNA, 21 bp, Homo sapiens
aacgaggagaagaggctgaag

SEQ ID NO: 4016 - RNA, 21 nt, RNAi-sense strand
cgaggagaagaggcugaaguu

SEQ ID NO: 4017 - RNA, 21 nt, RNAi-antisense strand
cuucagccucuucuccucguu

SEQ ID NO: 4018 - DNA, 21 bp, Homo sapiens
aagaggctgaagctggcgaga

SEQ ID NO: 4019 - RNA, 21 nt, RNAi-sense strand
gaggcugaagcuggcgagauu

SEQ ID NO: 4020 - RNA, 21 nt, RNAi-antisense strand
ucucgccagcuucagccucuu

SEQ ID NO: 4021 - DNA, 21 bp, Homo sapiens
aagctggcgagagccatctac

SEQ ID NO: 4022 - RNA, 21 nt, RNAi-sense strand
gcuggcgagagccaucuacuu

SEQ ID NO: 4023 - RNA, 21 nt, RNAi-antisense strand
guagauggcucucgccagcuu

SEQ ID NO: 4024 - DNA, 21 bp, Homo sapiens
aagccagccaccaagagcttc

SEQ ID NO: 4025 - RNA, 21 nt, RNAi-sense strand
gccagccaccaagagcuucuu

SEQ ID NO: 4026 - RNA, 21 nt, RNAi-antisense strand
gaagcucuugguggcuggcuu

SEQ ID NO: 4027 - DNA, 21 bp, Homo sapiens
aagcagctgatcgatcctgcc

SEQ ID NO: 4028 - RNA, 21 nt, RNAi-sense strand
gcagcugaucgauccugccuu

SEQ ID NO: 4029 - RNA, 21 nt, RNAi-antisense strand
ggcaggaucgaucagcugcuu

SEQ ID NO: 4030 - DNA, 21 bp, Homo sapiens
aaatccaggccactatggagg

SEQ ID NO: 4031 - RNA, 21 nt, RNAi-sense strand
auccaggccacuauggagguu

SEQ ID NO: 4032 - RNA, 21 nt, RNAi-antisense strand
ccuccauaguggccuggauuu

SEQ ID NO: 4033 - DNA, 21 bp, Homo sapiens
aatccaggccactatggagga

SEQ ID NO: 4034 - RNA, 21 nt, RNAi-sense strand
uccaggccacuauggaggauu

SEQ ID NO: 4035 - RNA, 21 nt, RNAi-antisense strand
uccuccauaguggccuggauu

SEQ ID NO: 4036 - DNA, 21 bp, Homo sapiens
aatatacgaggacaggctcgg

SEQ ID NO: 4037 - RNA, 21 nt, RNAi-sense strand
uauacgaggacaggcucgguu

SEQ ID NO: 4038 - RNA, 21 nt, RNAi-antisense strand
ccgagccuguccucguauauu

SEQ ID NO: 4039 - DNA, 21 bp, Homo sapiens
aaagtctgtagtgaccagagc

SEQ ID NO: 4040 - RNA, 21 nt, RNAi-sense strand
agucuguagugaccagagcuu

SEQ ID NO: 4041 - RNA, 21 nt, RNAi-antisense strand
gcucuggucacuacagacuuu

SEQ ID NO: 4042 - DNA, 21 bp, Homo sapiens
aagtctgtagtgaccagagct

SEQ ID NO: 4043 - RNA, 21 nt, RNAi-sense strand
gucuguagugaccagagcuuu

SEQ ID NO: 4044 - RNA, 21 nt, RNAi-antisense strand
agcucuggucacuacagacuu

SEQ ID NO: 4045 - DNA, 21 bp, Homo sapiens
aaatgaagatgaggaatggaa

SEQ ID NO: 4046 - RNA, 21 nt, RNAi-sense strand
augaagaugaggaauggaauu

SEQ ID NO: 4047 - RNA, 21 nt, RNAi-antisense strand
uuccauuccucaucuucauuu

SEQ ID NO: 4048 - DNA, 21 bp, Homo sapiens
aatgaagatgaggaatggaag

SEQ ID NO: 4049 - RNA, 21 nt, RNAi-sense strand
ugaagaugaggaauggaaguu

SEQ ID NO: 4050 - RNA, 21 nt, RNAi-antisense strand
cuuccauuccucaucuucauu

SEQ ID NO: 4051 - DNA, 21 bp, Homo sapiens
aagatgaggaatggaagtgtg

SEQ ID NO: 4052 - RNA, 21 nt, RNAi-sense strand
gaugaggaauggaaguguguu

SEQ ID NO: 4053 - RNA, 21 nt, RNAi-antisense strand
cacacuuccauuccucaucuu

SEQ ID NO: 4054 - DNA, 21 bp, Homo sapiens
aatggaagtgtgaccaggaca

SEQ ID NO: 4055 - RNA, 21 nt, RNAi-sense strand
uggaagugugaccaggacauu

SEQ ID NO: 4056 - RNA, 21 nt, RNAi-antisense strand
uguccuggucacacuuccauu

SEQ ID NO: 4057 - DNA, 21 bp, Homo sapiens
aagtgtgaccaggacatggat

SEQ ID NO: 4058 - RNA, 21 nt, RNAi-sense strand
gugugaccaggacauggauuu

SEQ ID NO: 4059 - RNA, 21 nt, RNAi-antisense strand
auccauguccuggucacacuu

SEQ ID NO: 4060 - DNA, 21 bp, Homo sapiens
aagctgctcctggagacagct

SEQ ID NO: 4061 - RNA, 21 nt, RNAi-sense strand
gcugcuccuggagacagcuuu

SEQ ID NO: 4062 - RNA, 21 nt, RNAi-antisense strand
agcugucuccaggagcagcuu

SEQ ID NO: 4063 - DNA, 21 bp, Homo sapiens
aaggcagagagttcaggtatg

SEQ ID NO: 4064 - RNA, 21 nt, RNAi-sense strand
ggcagagaguucagguauguu

SEQ ID NO: 4065 - RNA, 21 nt, RNAi-antisense strand
cauaccugaacucucugccuu

SEQ ID NO: 4066 - DNA, 21 bp, Homo sapiens
aacgacagcgagcagcagagc

SEQ ID NO: 4067 - RNA, 21 nt, RNAi-sense strand
cgacagcgagcagcagagcuu

SEQ ID NO: 4068 - RNA, 21 nt, RNAi-antisense strand
gcucugcugcucgcugucguu

SEQ ID NO: 4069 - DNA, 21 bp, Homo sapiens
aagttcgcggaggagctcatc

SEQ ID NO: 4070 - RNA, 21 nt, RNAi-sense strand
guucgcggaggagcucaucuu

SEQ ID NO: 4071 - RNA, 21 nt, RNAi-antisense strand
gaugagcuccuccgcgaacuu

SEQ ID NO: 4072 - DNA, 21 bp, Homo sapiens
aagctggaggagcggctgaag

SEQ ID NO: 4073 - RNA, 21 nt, RNAi-sense strand
gcuggaggagcggcugaaguu

SEQ ID NO: 4074 - RNA, 21 nt, RNAi-antisense strand
cuucagccgcuccuccagcuu

SEQ ID NO: 4075 - DNA, 21 bp, Homo sapiens
aaggtgaggacggcgatccat

SEQ ID NO: 4076 - RNA, 21 nt, RNAi-sense strand
ggugaggacggcgauccauuu

SEQ ID NO: 4077 - RNA, 21 nt, RNAi-antisense strand
auggaucgccguccucaccuu

SEQ ID NO: 4078 - DNA, 21 bp, Homo sapiens
aaagaaatgccaagaaggctg

SEQ ID NO: 4079 - RNA, 21 nt, RNAi-sense strand
agaaaugccaagaaggcuguu

SEQ ID NO: 4080 - RNA, 21 nt, RNAi-antisense strand
cagccuucuuggcauuucuuu

SEQ ID NO: 4081 - DNA, 21 bp, Homo sapiens
aagaaatgccaagaaggctga

SEQ ID NO: 4082 - RNA, 21 nt, RNAi-sense strand
gaaaugccaagaaggcugauu

SEQ ID NO: 4083 - RNA, 21 nt, RNAi-antisense strand
ucagccuucuuggcauuucuu

SEQ ID NO: 4084 - DNA, 21 bp, Homo sapiens
aaatgccaagaaggctgagtc

SEQ ID NO: 4085 - RNA, 21 nt, RNAi-sense strand
augccaagaaggcugagucuu

SEQ ID NO: 4086 - RNA, 21 nt, RNAi-antisense strand
gacucagccuucuuggcauuu

SEQ ID NO: 4087 - DNA, 21 bp, Homo sapiens
aatgccaagaaggctgagtcg

SEQ ID NO: 4088 - RNA, 21 nt, RNAi-sense strand
ugccaagaaggcugagucguu

SEQ ID NO: 4089 - RNA, 21 nt, RNAi-antisense strand
cgacucagccuucuuggcauu

SEQ ID NO: 4090 - DNA, 21 bp, Homo sapiens
aaatcatgcagtggatcattg

SEQ ID NO: 4091 - RNA, 21 nt, RNAi-sense strand
aucaugcaguggaucauuguu

SEQ ID NO: 4092 - RNA, 21 nt, RNAi-antisense strand
caaugauccacugcaugauuu

SEQ ID NO: 4093 - DNA, 21 bp, Homo sapiens
aatcatgcagtggatcattga

SEQ ID NO: 4094 - RNA, 21 nt, RNAi-sense strand
ucaugcaguggaucauugauu

SEQ ID NO: 4095 - RNA, 21 nt, RNAi-antisense strand
ucaaugauccacugcaugauu

SEQ ID NO: 4096 - DNA, 21 bp, Homo sapiens
aaaggagatcagcaggcaccg

SEQ ID NO: 4097 - RNA, 21 nt, RNAi-sense strand
aggagaucagcaggcaccguu

SEQ ID NO: 4098 - RNA, 21 nt, RNAi-antisense strand
cggugccugcugaucuccuuu

SEQ ID NO: 4099 - DNA, 21 bp, Homo sapiens
aaggagatcagcaggcaccgc

SEQ ID NO: 4100 - RNA, 21 nt, RNAi-sense strand
ggagaucagcaggcaccgcuu

SEQ ID NO: 4101 - RNA, 21 nt, RNAi-antisense strand
gcggugccugcugaucuccuu

SEQ ID NO: 4102 - DNA, 21 bp, Homo sapiens
aaagagagccagccgagcacc

SEQ ID NO: 4103 - RNA, 21 nt, RNAi-sense strand
agagagccagccgagcaccuu

SEQ ID NO: 4104 - RNA, 21 nt, RNAi-antisense strand
ggugcucggcuggcucucuuu

SEQ ID NO: 4105 - DNA, 21 bp, Homo sapiens
aagcagaggtatgtgcaggag

SEQ ID NO: 4106 - RNA, 21 nt, RNAi-sense strand
gcagagguaugugcaggaguu

SEQ ID NO: 4107 - RNA, 21 nt, RNAi-antisense strand
cuccugcacauaccucugcuu

SEQ ID NO: 4108 - DNA, 21 bp, Homo sapiens
aagaaagtgagcgacgagttt

SEQ ID NO: 4109 - RNA, 21 nt, RNAi-sense strand
gaaagugagcgacgaguuuuu

SEQ ID NO: 4110 - RNA, 21 nt, RNAi-antisense strand
aaacucgucgcucacuuucuu

SEQ ID NO: 4111 - DNA, 21 bp, Homo sapiens
aaagtgagcgacgagtttgac

SEQ ID NO: 4112 - RNA, 21 nt, RNAi-sense strand
agugagcgacgaguuugacuu

SEQ ID NO: 4113 - RNA, 21 nt, RNAi-antisense strand
gucaaacucgucgcucacuuu

SEQ ID NO: 4114 - DNA, 21 bp, Homo sapiens
aagtgagcgacgagtttgact

SEQ ID NO: 4115 - RNA, 21 nt, RNAi-sense strand
gugagcgacgaguuugacuuu

SEQ ID NO: 4116 - RNA, 21 nt, RNAi-antisense strand
agucaaacucgucgcucacuu

SEQ ID NO: 4117 - DNA, 21 bp, Homo sapiens
aagatcatcggcaaagtggag

SEQ ID NO: 4118 - RNA, 21 nt, RNAi-sense strand
gaucaucggcaaaguggaguu

SEQ ID NO: 4119 - RNA, 21 nt, RNAi-antisense strand
cuccacuuugccgaugaucuu

SEQ ID NO: 4120 - DNA, 21 bp, Homo sapiens
aaagtggagaaggtggactga

SEQ ID NO: 4121 - RNA, 21 nt, RNAi-sense strand
aguggagaagguggacugauu

SEQ ID NO: 4122 - RNA, 21 nt, RNAi-antisense strand
ucaguccaccuucuccacuuu

SEQ ID NO: 4123 - DNA, 21 bp, Homo sapiens
aagtggagaaggtggactgat

SEQ ID NO: 4124 - RNA, 21 nt, RNAi-sense strand
guggagaagguggacugauuu

SEQ ID NO: 4125 - RNA, 21 nt, RNAi-antisense strand
aucaguccaccuucuccacuu

SEQ ID NO: 4126 - DNA, 21 bp, Homo sapiens
aaggtggactgataggctggt

SEQ ID NO: 4127 - RNA, 21 nt, RNAi-sense strand
gguggacugauaggcugguuu

SEQ ID NO: 4128 - RNA, 21 nt, RNAi-antisense strand
accagccuaucaguccaccuu

SEQ ID NO: 4129 - DNA, 21 bp, Homo sapiens
aagtggtccacaagcttctgt

SEQ ID NO: 4130 - RNA, 21 nt, RNAi-sense strand
gugguccacaagcuucuguuu

SEQ ID NO: 4131 - RNA, 21 nt, RNAi-antisense strand
acagaagcuuguggaccacuu

SEQ ID NO: 4132 - DNA, 21 bp, Homo sapiens
aaggaggcagcctggaccact

SEQ ID NO: 4133 - RNA, 21 nt, RNAi-sense strand
ggaggcagccuggaccacuuu

SEQ ID NO: 4134 - RNA, 21 nt, RNAi-antisense strand
agugguccaggcugccuccuu

SEQ ID NO: 4135 - DNA, 21 bp, Homo sapiens
aattgtacgcgccaccgagtg

SEQ ID NO: 4136 - RNA, 21 nt, RNAi-sense strand
uuguacgcgccaccgaguguu

SEQ ID NO: 4137 - RNA, 21 nt, RNAi-antisense strand
cacucgguggcgcguacaauu

SEQ ID NO: 4138 - DNA, 21 bp, Homo sapiens
aacacagcttgtctcttgcct

SEQ ID NO: 4139 - RNA, 21 nt, RNAi-sense strand
cacagcuugucucuugccuuu

SEQ ID NO: 4140 - RNA, 21 nt, RNAi-antisense strand
aggcaagagacaagcuguguu

SEQ ID NO: 4141 - DNA, 21 bp, Homo sapiens
aatcggcgacggagcactgca

SEQ ID NO: 4142 - RNA, 21 nt, RNAi-sense strand
ucggcgacggagcacugcauu

SEQ ID NO: 4143 - RNA, 21 nt, RNAi-antisense strand
ugcagugcuccgucgccgauu

SEQ ID NO: 4144 - DNA, 21 bp, Homo sapiens
aaatatgtacatttctcaggc

SEQ ID NO: 4145 - RNA, 21 nt, RNAi-sense strand
auauguacauuucucaggcuu

SEQ ID NO: 4146 - RNA, 21 nt, RNAi-antisense strand
gccugagaaauguacauauuu

SEQ ID NO: 4147 - DNA, 21 bp, Homo sapiens
aatatgtacatttctcaggct

SEQ ID NO: 4148 - RNA, 21 nt, RNAi-sense strand
uauguacauuucucaggcuuu

SEQ ID NO: 4149 - RNA, 21 nt, RNAi-antisense strand
agccugagaaauguacauauu

SEQ ID NO: 4150 - DNA, 21 bp, Homo sapiens
cagattgattcactttggagc

SEQ ID NO: 4151 - RNA, 21 nt, RNAi-sense strand
gauugauucacuuuggagcuu

SEQ ID NO: 4152 - RNA, 21 nt, RNAi-antisense strand
gcuccaaagugaaucaaucuu

SEQ ID NO: 4153 - DNA, 21 bp, Homo sapiens
cactttggagctgtaagtact

SEQ ID NO: 4154 - RNA, 21 nt, RNAi-sense strand
cuuuggagcuguaaguacuuu

SEQ ID NO: 4155 - RNA, 21 nt, RNAi-antisense strand
aguacuuacagcuccaaaguu

SEQ ID NO: 4156 - DNA, 21 bp, Homo sapiens
cagcgctcattgttccttgac

SEQ ID NO: 4157 - RNA, 21 nt, RNAi-sense strand
gcgcucauuguuccuugacuu

SEQ ID NO: 4158 - RNA, 21 nt, RNAi-antisense strand
gucaaggaacaaugagcgcuu

SEQ ID NO: 4159 - DNA, 21 bp, Homo sapiens
cattgttccttgacgcagagt

SEQ ID NO: 4160 - RNA, 21 nt, RNAi-sense strand
uuguuccuugacgcagaguuu

SEQ ID NO: 4161 - RNA, 21 nt, RNAi-antisense strand
acucugcgucaaggaacaauu

SEQ ID NO: 4162 - DNA, 21 bp, Homo sapiens
caagtttcaccgaagatgctc

SEQ ID NO: 4163 - RNA, 21 nt, RNAi-sense strand
aguuucaccgaagaugcucuu

SEQ ID NO: 4164 - RNA, 21 nt, RNAi-antisense strand
gagcaucuucggugaaacuuu

SEQ ID NO: 4165 - DNA, 21 bp, Homo sapiens
cagctacagtttctgctccgg

SEQ ID NO: 4166 - RNA, 21 nt, RNAi-sense strand
gcuacaguuucugcuccgguu

SEQ ID NO: 4167 - RNA, 21 nt, RNAi-antisense strand
ccggagcagaaacuguagcuu

SEQ ID NO: 4168 - DNA, 21 bp, Homo sapiens
cattaaaggtgagacttcgac

SEQ ID NO: 4169 - RNA, 21 nt, RNAi-sense strand
uuaaaggugagacuucgacuu

SEQ ID NO: 4170 - RNA, 21 nt, RNAi-antisense strand
gucgaagucucaccuuuaauu

SEQ ID NO: 4171 - DNA, 21 bp, Homo sapiens
caggactttcctgaagcagga

SEQ ID NO: 4172 - RNA, 21 nt, RNAi-sense strand
ggacuuuccugaagcaggauu

SEQ ID NO: 4173 - RNA, 21 nt, RNAi-antisense strand
uccugcuucaggaaaguccuu

SEQ ID NO: 4174 - DNA, 21 bp, Homo sapiens
cactggcttcaggaagctgga

SEQ ID NO: 4175 - RNA, 21 nt, RNAi-sense strand
cuggcuucaggaagcuggauu

SEQ ID NO: 4176 - RNA, 21 nt, RNAi-antisense strand
uccagcuuccugaagccaguu

SEQ ID NO: 4177 - DNA, 21 bp, Homo sapiens
catctaccgaaagtacattct

SEQ ID NO: 4178 - RNA, 21 nt, RNAi-sense strand
ucuaccgaaaguacauucuuu

SEQ ID NO: 4179 - RNA, 21 nt, RNAi-antisense strand
agaauguacuuucgguagauu

SEQ ID NO: 4180 - DNA, 21 bp, Homo sapiens
cattcttgataacaatggcat

SEQ ID NO: 4181 - RNA, 21 nt, RNAi-sense strand
uucuugauaacaauggcauuu

SEQ ID NO: 4182 - RNA, 21 nt, RNAi-antisense strand
augccauuguuaucaagaauu

SEQ ID NO: 4183 - DNA, 21 bp, Homo sapiens
cagaccaagccagccaccaag

SEQ ID NO: 4184 - RNA, 21 nt, RNAi-sense strand
gaccaagccagccaccaaguu

SEQ ID NO: 4185 - RNA, 21 nt, RNAi-antisense strand
cuugguggcuggcuuggucuu

SEQ ID NO: 4186 - DNA, 21 bp, Homo sapiens
caagccagccaccaagagctt

SEQ ID NO: 4187 - RNA, 21 nt, RNAi-sense strand
agccagccaccaagagcuuuu

SEQ ID NO: 4188 - RNA, 21 nt, RNAi-antisense strand
aagcucuugguggcuggcuuu

SEQ ID NO: 4189 - DNA, 21 bp, Homo sapiens
cagccaccaagagcttcataa

SEQ ID NO: 4190 - RNA, 21 nt, RNAi-sense strand
gccaccaagagcuucauaauu

SEQ ID NO: 4191 - RNA, 21 nt, RNAi-antisense strand
uuaugaagcucuugguggcuu

SEQ ID NO: 4192 - DNA, 21 bp, Homo sapiens
catcatgaagcagctgatcga

SEQ ID NO: 4193 - RNA, 21 nt, RNAi-sense strand
ucaugaagcagcugaucgauu

SEQ ID NO: 4194 - RNA, 21 nt, RNAi-antisense strand
ucgaucagcugcuucaugauu

SEQ ID NO: 4195 - DNA, 21 bp, Homo sapiens
catgaagcagctgatcgatcc

SEQ ID NO: 4196 - RNA, 21 nt, RNAi-sense strand
ugaagcagcugaucgauccuu

SEQ ID NO: 4197 - RNA, 21 nt, RNAi-antisense strand
ggaucgaucagcugcuucauu

SEQ ID NO: 4198 - DNA, 21 bp, Homo sapiens
cagctgatcgatcctgccatg

SEQ ID NO: 4199 - RNA, 21 nt, RNAi-sense strand
gcugaucgauccugccauguu

SEQ ID NO: 4200 - RNA, 21 nt, RNAi-antisense strand
cauggcaggaucgaucagcuu

SEQ ID NO: 4201 - DNA, 21 bp, Homo sapiens
cagaccgaaatccaggccact

SEQ ID NO: 4202 - RNA, 21 nt, RNAi-sense strand
gaccgaaauccaggccacuuu

SEQ ID NO: 4203 - RNA, 21 nt, RNAi-antisense strand
aguggccuggauuucggucuu

SEQ ID NO: 4204 - DNA, 21 bp, Homo sapiens
caaagtctgtagtgaccagag

SEQ ID NO: 4205 - RNA, 21 nt, RNAi-sense strand
aagucuguagugaccagaguu

SEQ ID NO: 4206 - RNA, 21 nt, RNAi-antisense strand
cucuggucacuacagacuuuu

SEQ ID NO: 4207 - DNA, 21 bp, Homo sapiens
catatctggatacctgccgac

SEQ ID NO: 4208 - RNA, 21 nt, RNAi-sense strand
uaucuggauaccugccgacuu

SEQ ID NO: 4209 - RNA, 21 nt, RNAi-antisense strand
gucggcagguauccagauauu

SEQ ID NO: 4210 - DNA, 21 bp, Homo sapiens
caggacatggatgaggacgat

SEQ ID NO: 4211 - RNA, 21 nt, RNAi-sense strand
ggacauggaugaggacgauuu

SEQ ID NO: 4212 - RNA, 21 nt, RNAi-antisense strand
aucguccucauccauguccuu

SEQ ID NO: 4213 - DNA, 21 bp, Homo sapiens
catggatgaggacgatggcag

SEQ ID NO: 4214 - RNA, 21 nt, RNAi-sense strand
uggaugaggacgauggcaguu

SEQ ID NO: 4215 - RNA, 21 nt, RNAi-antisense strand
cugccaucguccucauccauu

SEQ ID NO: 4216 - DNA, 21 bp, Homo sapiens
cagaagctgctcctggagaca

SEQ ID NO: 4217 - RNA, 21 nt, RNAi-sense strand
gaagcugcuccuggagacauu

SEQ ID NO: 4218 - RNA, 21 nt, RNAi-antisense strand
ugucuccaggagcagcuucuu

SEQ ID NO: 4219 - DNA, 21 bp, Homo sapiens
cagtagacggtacagcgaagg

SEQ ID NO: 4220 - RNA, 21 nt, RNAi-sense strand
guagacgguacagcgaagguu

SEQ ID NO: 4221 - RNA, 21 nt, RNAi-antisense strand
ccuucgcuguaccgucuacuu

SEQ ID NO: 4222 - DNA, 21 bp, Homo sapiens
cagcgaaggcagagagttcag

SEQ ID NO: 4223 - RNA, 21 nt, RNAi-sense strand
gcgaaggcagagaguucaguu

SEQ ID NO: 4224 - RNA, 21 nt, RNAi-antisense strand
cugaacucucugccuucgcuu

SEQ ID NO: 4225 - DNA, 21 bp, Homo sapiens
cagagagttcaggtatggatc

SEQ ID NO: 4226 - RNA, 21 nt, RNAi-sense strand
gagaguucagguauggaucuu

SEQ ID NO: 4227 - RNA, 21 nt, RNAi-antisense strand
gauccauaccugaacucucuu

SEQ ID NO: 4228 - DNA, 21 bp, Homo sapiens
cagccaccagtgccaacgaca

SEQ ID NO: 4229 - RNA, 21 nt, RNAi-sense strand
gccaccagugccaacgacauu

SEQ ID NO: 4230 - RNA, 21 nt, RNAi-antisense strand
ugucguuggcacugguggcuu

SEQ ID NO: 4231 - DNA, 21 bp, Homo sapiens
caccagtgccaacgacagcga

SEQ ID NO: 4232 - RNA, 21 nt, RNAi-sense strand
ccagugccaacgacagcgauu

SEQ ID NO: 4233 - RNA, 21 nt, RNAi-antisense strand
ucgcugucguuggcacugguu

SEQ ID NO: 4234 - DNA, 21 bp, Homo sapiens
cagtgccaacgacagcgagca

SEQ ID NO: 4235 - RNA, 21 nt, RNAi-sense strand
gugccaacgacagcgagcauu

SEQ ID NO: 4236 - RNA, 21 nt, RNAi-antisense strand
ugcucgcugucguuggcacuu

SEQ ID NO: 4237 - DNA, 21 bp, Homo sapiens
caacgacagcgagcagcagag

SEQ ID NO: 4238 - RNA, 21 nt, RNAi-sense strand
acgacagcgagcagcagaguu

SEQ ID NO: 4239 - RNA, 21 nt, RNAi-antisense strand
cucugcugcucgcugucguuu

SEQ ID NO: 4240 - DNA, 21 bp, Homo sapiens
cagcagagcctgtccagcgat

SEQ ID NO: 4241 - RNA, 21 nt, RNAi-sense strand
gcagagccuguccagcgauuu

SEQ ID NO: 4242 - RNA, 21 nt, RNAi-antisense strand
aucgcuggacaggcucugcuu

SEQ ID NO: 4243 - DNA, 21 bp, Homo sapiens
cagagcctgtccagcgatgca

SEQ ID NO: 4244 - RNA, 21 nt, RNAi-sense strand
gagccuguccagcgaugcauu

SEQ ID NO: 4245 - RNA, 21 nt, RNAi-antisense strand
ugcaucgcuggacaggcucuu

SEQ ID NO: 4246 - DNA, 21 bp, Homo sapiens
catacaggatccgtaagcagc

SEQ ID NO: 4247 - RNA, 21 nt, RNAi-sense strand
uacaggauccguaagcagcuu

SEQ ID NO: 4248 - RNA, 21 nt, RNAi-antisense strand
gcugcuuacggauccuguauu

SEQ ID NO: 4249 - DNA, 21 bp, Homo sapiens
caggatccgtaagcagcaccg

SEQ ID NO: 4250 - RNA, 21 nt, RNAi-sense strand
ggauccguaagcagcaccguu

SEQ ID NO: 4251 - RNA, 21 nt, RNAi-antisense strand
cggugcugcuuacggauccuu

SEQ ID NO: 4252 - DNA, 21 bp, Homo sapiens
caggagagcgtgcaggtcaat

SEQ ID NO: 4253 - RNA, 21 nt, RNAi-sense strand
ggagagcgugcaggucaauuu

SEQ ID NO: 4254 - RNA, 21 nt, RNAi-antisense strand
auugaccugcacgcucuccuu

SEQ ID NO: 4255 - DNA, 21 bp, Homo sapiens
cagaagttcgcggaggagctc

SEQ ID NO: 4256 - RNA, 21 nt, RNAi-sense strand
gaaguucgcggaggagcucuu

SEQ ID NO: 4257 - RNA, 21 nt, RNAi-antisense strand
gagcuccuccgcgaacuucuu

SEQ ID NO: 4258 - DNA, 21 bp, Homo sapiens
catggaggaggaaggtgagga

SEQ ID NO: 4259 - RNA, 21 nt, RNAi-sense strand
uggaggaggaaggugaggauu

SEQ ID NO: 4260 - RNA, 21 nt, RNAi-antisense strand
uccucaccuuccuccuccauu

SEQ ID NO: 4261 - DNA, 21 bp, Homo sapiens
catcctggacgagcacgtaca

SEQ ID NO: 4262 - RNA, 21 nt, RNAi-sense strand
uccuggacgagcacguacauu

SEQ ID NO: 4263 - RNA, 21 nt, RNAi-antisense strand
uguacgugcucguccaggauu

SEQ ID NO: 4264 - DNA, 21 bp, Homo sapiens
cacgtacagcgtgtgctgagg

SEQ ID NO: 4265 - RNA, 21 nt, RNAi-sense strand
cguacagcgugugcugagguu

SEQ ID NO: 4266 - RNA, 21 nt, RNAi-antisense strand
ccucagcacacgcuguacguu

SEQ ID NO: 4267 - DNA, 21 bp, Homo sapiens
cagcgtgtgctgaggacacct

SEQ ID NO: 4268 - RNA, 21 nt, RNAi-sense strand
gcgugugcugaggacaccuuu

SEQ ID NO: 4269 - RNA, 21 nt, RNAi-antisense strand
agguguccucagcacacgcuu

SEQ ID NO: 4270 - DNA, 21 bp, Homo sapiens
cacgtggccaagatgccagtg

SEQ ID NO: 4271 - RNA, 21 nt, RNAi-sense strand
cguggccaagaugccaguguu

SEQ ID NO: 4272 - RNA, 21 nt, RNAi-antisense strand
cacuggcaucuuggccacguu

SEQ ID NO: 4273 - DNA, 21 bp, Homo sapiens
caccacgtccaccacagcaca

SEQ ID NO: 4274 - RNA, 21 nt, RNAi-sense strand
ccacguccaccacagcacauu

SEQ ID NO: 4275 - RNA, 21 nt, RNAi-antisense strand
ugugcugugguggacgugguu

SEQ ID NO: 4276 - DNA, 21 bp, Homo sapiens
caagcagaggtatgtgcagga

SEQ ID NO: 4277 - RNA, 21 nt, RNAi-sense strand
agcagagguaugugcaggauu

SEQ ID NO: 4278 - RNA, 21 nt, RNAi-antisense strand
uccugcacauaccucugcuuu

SEQ ID NO: 4279 - DNA, 21 bp, Homo sapiens
cagaggtatgtgcaggaggtt

SEQ ID NO: 4280 - RNA, 21 nt, RNAi-sense strand
gagguaugugcaggagguuuu

SEQ ID NO: 4281 - RNA, 21 nt, RNAi-antisense strand
aaccuccugcacauaccucuu

SEQ ID NO: 4282 - DNA, 21 bp, Homo sapiens
catggagctctccgagacaga

SEQ ID NO: 4283 - RNA, 21 nt, RNAi-sense strand
uggagcucuccgagacagauu

SEQ ID NO: 4284 - RNA, 21 nt, RNAi-antisense strand
ucugucucggagagcuccauu

SEQ ID NO: 4285 - DNA, 21 bp, Homo sapiens
cagagacaagatcgcagagga

SEQ ID NO: 4286 - RNA, 21 nt, RNAi-sense strand
gagacaagaucgcagaggauu

SEQ ID NO: 4287 - RNA, 21 nt, RNAi-antisense strand
uccucugcgaucuugucucuu

SEQ ID NO: 4288 - DNA, 21 bp, Homo sapiens
caagatcgcagaggaaggtgg

SEQ ID NO: 4289 - RNA, 21 nt, RNAi-sense strand
agaucgcagaggaaggugguu

SEQ ID NO: 4290 - RNA, 21 nt, RNAi-antisense strand
ccaccuuccucugcgaucuuu

SEQ ID NO: 4291 - DNA, 21 bp, Homo sapiens
cagccgtgtgacagcatcgtt

SEQ ID NO: 4292 - RNA, 21 nt, RNAi-sense strand
gccgugugacagcaucguuuu

SEQ ID NO: 4293 - RNA, 21 nt, RNAi-antisense strand
aacgaugcugucacacggcuu

SEQ ID NO: 4294 - DNA, 21 bp, Homo sapiens
cagcatcgttgtggcgtacta

SEQ ID NO: 4295 - RNA, 21 nt, RNAi-sense strand
gcaucguuguggcguacuauu

SEQ ID NO: 4296 - RNA, 21 nt, RNAi-antisense strand
uaguacgccacaacgaugcuu

SEQ ID NO: 4297 - DNA, 21 bp, Homo sapiens
catcgttgtggcgtactactt

SEQ ID NO: 4298 - RNA, 21 nt, RNAi-sense strand
ucguuguggcguacuacuuuu

SEQ ID NO: 4299 - RNA, 21 nt, RNAi-antisense strand
aaguaguacgccacaacgauu

SEQ ID NO: 4300 - DNA, 21 bp, Homo sapiens
cagttcaaggagctgctgacc

SEQ ID NO: 4301 - RNA, 21 nt, RNAi-sense strand
guucaaggagcugcugaccuu

SEQ ID NO: 4302 - RNA, 21 nt, RNAi-antisense strand
ggucagcagcuccuugaacuu

SEQ ID NO: 4303 - DNA, 21 bp, Homo sapiens
cagctacagatactacttcaa

SEQ ID NO: 4304 - RNA, 21 nt, RNAi-sense strand
gcuacagauacuacuucaauu

SEQ ID NO: 4305 - RNA, 21 nt, RNAi-antisense strand
uugaaguaguaucuguagcuu

SEQ ID NO: 4306 - DNA, 21 bp, Homo sapiens
cagatactacttcaagaaagt

SEQ ID NO: 4307 - RNA, 21 nt, RNAi-sense strand
gauacuacuucaagaaaguuu

SEQ ID NO: 4308 - RNA, 21 nt, RNAi-antisense strand
acuuucuugaaguaguaucuu

SEQ ID NO: 4309 - DNA, 21 bp, Homo sapiens
caagaaagtgagcgacgagtt

SEQ ID NO: 4310 - RNA, 21 nt, RNAi-sense strand
agaaagugagcgacgaguuuu

SEQ ID NO: 4311 - RNA, 21 nt, RNAi-antisense strand
aacucgucgcucacuuucuuu

SEQ ID NO: 4312 - DNA, 21 bp, Homo sapiens
catcggcaaagtggagaaggt

SEQ ID NO: 4313 - RNA, 21 nt, RNAi-sense strand
ucggcaaaguggagaagguuu

SEQ ID NO: 4314 - RNA, 21 nt, RNAi-antisense strand
accuucuccacuuugccgauu

SEQ ID NO: 4315 - DNA, 21 bp, Homo sapiens
caaagtggagaaggtggactg

SEQ ID NO: 4316 - RNA, 21 nt, RNAi-sense strand
aaguggagaagguggacuguu

SEQ ID NO: 4317 - RNA, 21 nt, RNAi-antisense strand
caguccaccuucuccacuuuu

SEQ ID NO: 4318 - DNA, 21 bp, Homo sapiens
caggcagatgacctcgtactc

SEQ ID NO: 4319 - RNA, 21 nt, RNAi-sense strand
ggcagaugaccucguacucuu

SEQ ID NO: 4320 - RNA, 21 nt, RNAi-antisense strand
gaguacgaggucaucugccuu

SEQ ID NO: 4321 - DNA, 21 bp, Homo sapiens
cagatgacctcgtactcagga

SEQ ID NO: 4322 - RNA, 21 nt, RNAi-sense strand
gaugaccucguacucaggauu

SEQ ID NO: 4323 - RNA, 21 nt, RNAi-antisense strand
uccugaguacgaggucaucuu

SEQ ID NO: 4324 - DNA, 21 bp, Homo sapiens
caagtggtccacaagcttctg

SEQ ID NO: 4325 - RNA, 21 nt, RNAi-sense strand
agugguccacaagcuucuguu

SEQ ID NO: 4326 - RNA, 21 nt, RNAi-antisense strand
cagaagcuuguggaccacuuu

SEQ ID NO: 4327 - DNA, 21 bp, Homo sapiens
cagcctggaccactcctcata

SEQ ID NO: 4328 - RNA, 21 nt, RNAi-sense strand
gccuggaccacuccucauauu

SEQ ID NO: 4329 - RNA, 21 nt, RNAi-antisense strand
uaugaggagugguccaggcuu

SEQ ID NO: 4330 - DNA, 21 bp, Homo sapiens
cactcctcatagcaatacttg

SEQ ID NO: 4331 - RNA, 21 nt, RNAi-sense strand
cuccucauagcaauacuuguu

SEQ ID NO: 4332 - RNA, 21 nt, RNAi-antisense strand
caaguauugcuaugaggaguu

SEQ ID NO: 4333 - DNA, 21 bp, Homo sapiens
caattgtacgcgccaccgagt

SEQ ID NO: 4334 - RNA, 21 nt, RNAi-sense strand
auuguacgcgccaccgaguuu

SEQ ID NO: 4335 - RNA, 21 nt, RNAi-antisense strand
acucgguggcgcguacaauuu

SEQ ID NO: 4336 - DNA, 21 bp, Homo sapiens
caccgagtgccttcaacacag

SEQ ID NO: 4337 - RNA, 21 nt, RNAi-sense strand
ccgagugccuucaacacaguu

SEQ ID NO: 4338 - RNA, 21 nt, RNAi-antisense strand
cuguguugaaggcacucgguu

SEQ ID NO: 4339 - DNA, 21 bp, Homo sapiens
caacacagcttgtctcttgcc

SEQ ID NO: 4340 - RNA, 21 nt, RNAi-sense strand
acacagcuugucucuugccuu

SEQ ID NO: 4341 - RNA, 21 nt, RNAi-antisense strand
ggcaagagacaagcuguguuu

SEQ ID NO: 4342 - DNA, 21 bp, Homo sapiens
cacagcttgtctcttgcctgc

SEQ ID NO: 4343 - RNA, 21 nt, RNAi-sense strand
cagcuugucucuugccugcuu

SEQ ID NO: 4344 - RNA, 21 nt, RNAi-antisense strand
gcaggcaagagacaagcuguu

SEQ ID NO: 4345 - DNA, 21 bp, Homo sapiens
cagcttgtctcttgcctgcca

SEQ ID NO: 4346 - RNA, 21 nt, RNAi-sense strand
gcuugucucuugccugccauu

SEQ ID NO: 4347 - RNA, 21 nt, RNAi-antisense strand
uggcaggcaagagacaagcuu

SEQ ID NO: 4348 - DNA, 21 bp, Homo sapiens
cactgtgtgaatcggcgacgg

SEQ ID NO: 4349 - RNA, 21 nt, RNAi-sense strand
cugugugaaucggcgacgguu

SEQ ID NO: 4350 - RNA, 21 nt, RNAi-antisense strand
ccgucgccgauucacacaguu

SEQ ID NO: 4351 - DNA, 21 bp, Homo sapiens
catttctcaggctaggccagc

SEQ ID NO: 4352 - RNA, 21 nt, RNAi-sense strand
uuucucaggcuaggccagcuu

SEQ ID NO: 4353 - RNA, 21 nt, RNAi-antisense strand
gcuggccuagccugagaaauu

SEQ ID NO: 4354 - DNA, 21 bp, Homo sapiens
catgcgatgacacttgtacaa

SEQ ID NO: 4355 - RNA, 21 nt, RNAi-sense strand
ugcgaugacacuuguacaauu

SEQ ID NO: 4356 - RNA, 21 nt, RNAi-antisense strand
uuguacaagugucaucgcauu

SEQ ID NO: 4357 - DNA, 21 bp, Homo sapiens
gacagattgattcactttgga

SEQ ID NO: 4358 - RNA, 21 nt, RNAi-sense strand
cagauugauucacuuuggauu

SEQ ID NO: 4359 - RNA, 21 nt, RNAi-antisense strand
uccaaagugaaucaaucuguu

SEQ ID NO: 4360 - DNA, 21 bp, Homo sapiens
gattgattcactttggagctg

SEQ ID NO: 4361 - RNA, 21 nt, RNAi-sense strand
uugauucacuuuggagcuguu

SEQ ID NO: 4362 - RNA, 21 nt, RNAi-antisense strand
cagcuccaaagugaaucaauu

SEQ ID NO: 4363 - DNA, 21 bp, Homo sapiens
gattcactttggagctgtaag

SEQ ID NO: 4364 - RNA, 21 nt, RNAi-sense strand
uucacuuuggagcuguaaguu

SEQ ID NO: 4365 - RNA, 21 nt, RNAi-antisense strand
cuuacagcuccaaagugaauu

SEQ ID NO: 4366 - DNA, 21 bp, Homo sapiens
gagctgtaagtactgatgtat

SEQ ID NO: 4367 - RNA, 21 nt, RNAi-sense strand
gcuguaaguacugauguauuu

SEQ ID NO: 4368 - RNA, 21 nt, RNAi-antisense strand
auacaucaguacuuacagcuu

SEQ ID NO: 4369 - DNA, 21 bp, Homo sapiens
gacctcggagcaagtttcacc

SEQ ID NO: 4370 - RNA, 21 nt, RNAi-sense strand
ccucggagcaaguuucaccuu

SEQ ID NO: 4371 - RNA, 21 nt, RNAi-antisense strand
ggugaaacuugcuccgagguu

SEQ ID NO: 4372 - DNA, 21 bp, Homo sapiens
gagcaagtttcaccgaagatg

SEQ ID NO: 4373 - RNA, 21 nt, RNAi-sense strand
gcaaguuucaccgaagauguu

SEQ ID NO: 4374 - RNA, 21 nt, RNAi-antisense strand
caucuucggugaaacuugcuu

SEQ ID NO: 4375 - DNA, 21 bp, Homo sapiens
gagaactggtgtccacagacc

SEQ ID NO: 4376 - RNA, 21 nt, RNAi-sense strand
gaacugguguccacagaccuu

SEQ ID NO: 4377 - RNA, 21 nt, RNAi-antisense strand
ggucuguggacaccaguucuu

SEQ ID NO: 4378 - DNA, 21 bp, Homo sapiens
gaaaggtgttggcattaaagg

SEQ ID NO: 4379 - RNA, 21 nt, RNAi-sense strand
aagguguuggcauuaaagguu

SEQ ID NO: 4380 - RNA, 21 nt, RNAi-antisense strand
ccuuuaaugccaacaccuuuu

SEQ ID NO: 4381 - DNA, 21 bp, Homo sapiens
gataagcctgttcaggacttt

SEQ ID NO: 4382 - RNA, 21 nt, RNAi-sense strand
uaagccuguucaggacuuuuu

SEQ ID NO: 4383 - RNA, 21 nt, RNAi-antisense strand
aaaguccugaacaggcuuauu

SEQ ID NO: 4384 - DNA, 21 bp, Homo sapiens
gacttgctggacttctggttt

SEQ ID NO: 4385 - RNA, 21 nt, RNAi-sense strand
cuugcuggacuucugguuuuu

SEQ ID NO: 4386 - RNA, 21 nt, RNAi-antisense strand
aaaccagaaguccagcaaguu

SEQ ID NO: 4387 - DNA, 21 bp, Homo sapiens
gacttctggtttgcctgcact

SEQ ID NO: 4388 - RNA, 21 nt, RNAi-sense strand
cuucugguuugccugcacuuu

SEQ ID NO: 4389 - RNA, 21 nt, RNAi-antisense strand
agugcaggcaaaccagaaguu

SEQ ID NO: 4390 - DNA, 21 bp, Homo sapiens
gactcgaacgaggagaagagg

SEQ ID NO: 4391 - RNA, 21 nt, RNAi-sense strand
cucgaacgaggagaagagguu

SEQ ID NO: 4392 - RNA, 21 nt, RNAi-antisense strand
ccucuucuccucguucgaguu

SEQ ID NO: 4393 - DNA, 21 bp, Homo sapiens
gaacgaggagaagaggctgaa

SEQ ID NO: 4394 - RNA, 21 nt, RNAi-sense strand
acgaggagaagaggcugaauu

SEQ ID NO: 4395 - RNA, 21 nt, RNAi-antisense strand
uucagccucuucuccucguuu

SEQ ID NO: 4396 - DNA, 21 bp, Homo sapiens
gaggagaagaggctgaagctg

SEQ ID NO: 4397 - RNA, 21 nt, RNAi-sense strand
ggagaagaggcugaagcuguu

SEQ ID NO: 4398 - RNA, 21 nt, RNAi-antisense strand
cagcuucagccucuucuccuu

SEQ ID NO: 4399 - DNA, 21 bp, Homo sapiens
gagaagaggctgaagctggcg

SEQ ID NO: 4400 - RNA, 21 nt, RNAi-sense strand
gaagaggcugaagcuggcguu

SEQ ID NO: 4401 - RNA, 21 nt, RNAi-antisense strand
cgccagcuucagccucuucuu

SEQ ID NO: 4402 - DNA, 21 bp, Homo sapiens
gaagaggctgaagctggcgag

SEQ ID NO: 4403 - RNA, 21 nt, RNAi-sense strand
agaggcugaagcuggcgaguu

SEQ ID NO: 4404 - RNA, 21 nt, RNAi-antisense strand
cucgccagcuucagccucuuu

SEQ ID NO: 4405 - DNA, 21 bp, Homo sapiens
gaagctggcgagagccatcta

SEQ ID NO: 4406 - RNA, 21 nt, RNAi-sense strand
agcuggcgagagccaucuauu

SEQ ID NO: 4407 - RNA, 21 nt, RNAi-antisense strand
uagauggcucucgccagcuuu

SEQ ID NO: 4408 - DNA, 21 bp, Homo sapiens
gagagccatctaccgaaagta

SEQ ID NO: 4409 - RNA, 21 nt, RNAi-sense strand
gagccaucuaccgaaaguauu

SEQ ID NO: 4410 - RNA, 21 nt, RNAi-antisense strand
uacuuucgguagauggcucuu

SEQ ID NO: 4411 - DNA, 21 bp, Homo sapiens
gagccatctaccgaaagtaca

SEQ ID NO: 4412 - RNA, 21 nt, RNAi-sense strand
gccaucuaccgaaaguacauu

SEQ ID NO: 4413 - RNA, 21 nt, RNAi-antisense strand
uguacuuucgguagauggcuu

SEQ ID NO: 4414 - DNA, 21 bp, Homo sapiens
gataacaatggcatcgtgtcc

SEQ ID NO: 4415 - RNA, 21 nt, RNAi-sense strand
uaacaauggcaucguguccuu

SEQ ID NO: 4416 - RNA, 21 nt, RNAi-antisense strand
ggacacgaugccauuguuauu

SEQ ID NO: 4417 - DNA, 21 bp, Homo sapiens
gaccaagccagccaccaagag

SEQ ID NO: 4418 - RNA, 21 nt, RNAi-sense strand
ccaagccagccaccaagaguu

SEQ ID NO: 4419 - RNA, 21 nt, RNAi-antisense strand
cucuugguggcuggcuugguu

SEQ ID NO: 4420 - DNA, 21 bp, Homo sapiens
gaagcagctgatcgatcctgc

SEQ ID NO: 4421 - RNA, 21 nt, RNAi-sense strand
agcagcugaucgauccugcuu

SEQ ID NO: 4422 - RNA, 21 nt, RNAi-antisense strand
gcaggaucgaucagcugcuuu

SEQ ID NO: 4423 - DNA, 21 bp, Homo sapiens
gatcgatcctgccatgtttga

SEQ ID NO: 4424 - RNA, 21 nt, RNAi-sense strand
ucgauccugccauguuugauu

SEQ ID NO: 4425 - RNA, 21 nt, RNAi-antisense strand
ucaaacauggcaggaucgauu

SEQ ID NO: 4426 - DNA, 21 bp, Homo sapiens
gatcctgccatgtttgaccag

SEQ ID NO: 4427 - RNA, 21 nt, RNAi-sense strand
uccugccauguuugaccaguu

SEQ ID NO: 4428 - RNA, 21 nt, RNAi-antisense strand
cuggucaaacauggcaggauu

SEQ ID NO: 4429 - DNA, 21 bp, Homo sapiens
gaccgaaatccaggccactat

SEQ ID NO: 4430 - RNA, 21 nt, RNAi-sense strand
ccgaaauccaggccacuauuu

SEQ ID NO: 4431 - RNA, 21 nt, RNAi-antisense strand
auaguggccuggauuucgguu

SEQ ID NO: 4432 - DNA, 21 bp, Homo sapiens
gaaatccaggccactatggag

SEQ ID NO: 4433 - RNA, 21 nt, RNAi-sense strand
aauccaggccacuauggaguu

SEQ ID NO: 4434 - RNA, 21 nt, RNAi-antisense strand
cuccauaguggccuggauuuu

SEQ ID NO: 4435 - DNA, 21 bp, Homo sapiens
gaatatacgaggacaggctcg

SEQ ID NO: 4436 - RNA, 21 nt, RNAi-sense strand
auauacgaggacaggcucguu

SEQ ID NO: 4437 - RNA, 21 nt, RNAi-antisense strand
cgagccuguccucguauauuu

SEQ ID NO: 4438 - DNA, 21 bp, Homo sapiens
gatacctgccgaccttaaatg

SEQ ID NO: 4439 - RNA, 21 nt, RNAi-sense strand
uaccugccgaccuuaaauguu

SEQ ID NO: 4440 - RNA, 21 nt, RNAi-antisense strand
cauuuaaggucggcagguauu

SEQ ID NO: 4441 - DNA, 21 bp, Homo sapiens
gaccttaaatgaagatgagga

SEQ ID NO: 4442 - RNA, 21 nt, RNAi-sense strand
ccuuaaaugaagaugaggauu

SEQ ID NO: 4443 - RNA, 21 nt, RNAi-antisense strand
uccucaucuucauuuaagguu

SEQ ID NO: 4444 - DNA, 21 bp, Homo sapiens
gaagatgaggaatggaagtgt

SEQ ID NO: 4445 - RNA, 21 nt, RNAi-sense strand
agaugaggaauggaaguguuu

SEQ ID NO: 4446 - RNA, 21 nt, RNAi-antisense strand
acacuuccauuccucaucuuu

SEQ ID NO: 4447 - DNA, 21 bp, Homo sapiens
gatgaggaatggaagtgtgac

SEQ ID NO: 4448 - RNA, 21 nt, RNAi-sense strand
ugaggaauggaagugugacuu

SEQ ID NO: 4449 - RNA, 21 nt, RNAi-antisense strand
gucacacuuccauuccucauu

SEQ ID NO: 4450 - DNA, 21 bp, Homo sapiens
gaggaatggaagtgtgaccag

SEQ ID NO: 4451 - RNA, 21 nt, RNAi-sense strand
ggaauggaagugugaccaguu

SEQ ID NO: 4452 - RNA, 21 nt, RNAi-antisense strand
cuggucacacuuccauuccuu

SEQ ID NO: 4453 - DNA, 21 bp, Homo sapiens
gaatggaagtgtgaccaggac

SEQ ID NO: 4454 - RNA, 21 nt, RNAi-sense strand
auggaagugugaccaggacuu

SEQ ID NO: 4455 - RNA, 21 nt, RNAi-antisense strand
guccuggucacacuuccauuu

SEQ ID NO: 4456 - DNA, 21 bp, Homo sapiens
gaagtgtgaccaggacatgga

SEQ ID NO: 4457 - RNA, 21 nt, RNAi-sense strand
agugugaccaggacauggauu

SEQ ID NO: 4458 - RNA, 21 nt, RNAi-antisense strand
uccauguccuggucacacuuu

SEQ ID NO: 4459 - DNA, 21 bp, Homo sapiens
gaccaggacatggatgaggac

SEQ ID NO: 4460 - RNA, 21 nt, RNAi-sense strand
ccaggacauggaugaggacuu

SEQ ID NO: 4461 - RNA, 21 nt, RNAi-antisense strand
guccucauccauguccugguu

SEQ ID NO: 4462 - DNA, 21 bp, Homo sapiens
gacatggatgaggacgatggc

SEQ ID NO: 4463 - RNA, 21 nt, RNAi-sense strand
cauggaugaggacgauggcuu

SEQ ID NO: 4464 - RNA, 21 nt, RNAi-antisense strand
gccaucguccucauccauguu

SEQ ID NO: 4465 - DNA, 21 bp, Homo sapiens
gatgaggacgatggcagagac

SEQ ID NO: 4466 - RNA, 21 nt, RNAi-sense strand
ugaggacgauggcagagacuu

SEQ ID NO: 4467 - RNA, 21 nt, RNAi-antisense strand
gucucugccaucguccucauu

SEQ ID NO: 4468 - DNA, 21 bp, Homo sapiens
gaggacgatggcagagacgct

SEQ ID NO: 4469 - RNA, 21 nt, RNAi-sense strand
ggacgauggcagagacgcuuu

SEQ ID NO: 4470 - RNA, 21 nt, RNAi-antisense strand
agcgucucugccaucguccuu

SEQ ID NO: 4471 - DNA, 21 bp, Homo sapiens
gacgatggcagagacgctgct

SEQ ID NO: 4472 - RNA, 21 nt, RNAi-sense strand
cgauggcagagacgcugcuuu

SEQ ID NO: 4473 - RNA, 21 nt, RNAi-antisense strand
agcagcgucucugccaucguu

SEQ ID NO: 4474 - DNA, 21 bp, Homo sapiens
gaagctgctcctggagacagc

SEQ ID NO: 4475 - RNA, 21 nt, RNAi-sense strand
agcugcuccuggagacagcuu

SEQ ID NO: 4476 - RNA, 21 nt, RNAi-antisense strand
gcugucuccaggagcagcuuu

SEQ ID NO: 4477 - DNA, 21 bp, Homo sapiens
gacggtacagcgaaggcagag

SEQ ID NO: 4478 - RNA, 21 nt, RNAi-sense strand
cgguacagcgaaggcagaguu

SEQ ID NO: 4479 - RNA, 21 nt, RNAi-antisense strand
cucugccuucgcuguaccguu

SEQ ID NO: 4480 - DNA, 21 bp, Homo sapiens
gaaggcagagagttcaggtat

SEQ ID NO: 4481 - RNA, 21 nt, RNAi-sense strand
aggcagagaguucagguauuu

SEQ ID NO: 4482 - RNA, 21 nt, RNAi-antisense strand
auaccugaacucucugccuuu

SEQ ID NO: 4483 - DNA, 21 bp, Homo sapiens
gagagttcaggtatggatcct

SEQ ID NO: 4484 - RNA, 21 nt, RNAi-sense strand
gaguucagguauggauccuuu

SEQ ID NO: 4485 - RNA, 21 nt, RNAi-antisense strand
aggauccauaccugaacucuu

SEQ ID NO: 4486 - DNA, 21 bp, Homo sapiens
gagttcaggtatggatcctgg

SEQ ID NO: 4487 - RNA, 21 nt, RNAi-sense strand
guucagguauggauccugguu

SEQ ID NO: 4488 - RNA, 21 nt, RNAi-antisense strand
ccaggauccauaccugaacuu

SEQ ID NO: 4489 - DNA, 21 bp, Homo sapiens
gagcctgtccagcgatgcaga

SEQ ID NO: 4490 - RNA, 21 nt, RNAi-sense strand
gccuguccagcgaugcagauu

SEQ ID NO: 4491 - RNA, 21 nt, RNAi-antisense strand
ucugcaucgcuggacaggcuu

SEQ ID NO: 4492 - DNA, 21 bp, Homo sapiens
gatccgtaagcagcaccgcag

SEQ ID NO: 4493 - RNA, 21 nt, RNAi-sense strand
uccguaagcagcaccgcaguu

SEQ ID NO: 4494 - RNA, 21 nt, RNAi-antisense strand
cugcggugcugcuuacggauu

SEQ ID NO: 4495 - DNA, 21 bp, Homo sapiens
gagatgcaggagagcgtgcag

SEQ ID NO: 4496 - RNA, 21 nt, RNAi-sense strand
gaugcaggagagcgugcaguu

SEQ ID NO: 4497 - RNA, 21 nt, RNAi-antisense strand
cugcacgcucuccugcaucuu

SEQ ID NO: 4498 - DNA, 21 bp, Homo sapiens
gatgcaggagagcgtgcaggt

SEQ ID NO: 4499 - RNA, 21 nt, RNAi-sense strand
ugcaggagagcgugcagguuu

SEQ ID NO: 4500 - RNA, 21 nt, RNAi-antisense strand
accugcacgcucuccugcauu

SEQ ID NO: 4501 - DNA, 21 bp, Homo sapiens
gagcctcagaagttcgcggag

SEQ ID NO: 4502 - RNA, 21 nt, RNAi-sense strand
gccucagaaguucgcggaguu

SEQ ID NO: 4503 - RNA, 21 nt, RNAi-antisense strand
cuccgcgaacuucugaggcuu

SEQ ID NO: 4504 - DNA, 21 bp, Homo sapiens
gaagttcgcggaggagctcat

SEQ ID NO: 4505 - RNA, 21 nt, RNAi-sense strand
aguucgcggaggagcucauuu

SEQ ID NO: 4506 - RNA, 21 nt, RNAi-antisense strand
augagcuccuccgcgaacuuu

SEQ ID NO: 4507 - DNA, 21 bp, Homo sapiens
gaagctggaggagcggctgaa

SEQ ID NO: 4508 - RNA, 21 nt, RNAi-sense strand
agcuggaggagcggcugaauu

SEQ ID NO: 4509 - RNA, 21 nt, RNAi-antisense strand
uucagccgcuccuccagcuuu

SEQ ID NO: 4510 - DNA, 21 bp, Homo sapiens
gaggaaggtgaggacggcgat

SEQ ID NO: 4511 - RNA, 21 nt, RNAi-sense strand
ggaaggugaggacggcgauuu

SEQ ID NO: 4512 - RNA, 21 nt, RNAi-antisense strand
aucgccguccucaccuuccuu

SEQ ID NO: 4513 - DNA, 21 bp, Homo sapiens
gaaggtgaggacggcgatcca

SEQ ID NO: 4514 - RNA, 21 nt, RNAi-sense strand
aggugaggacggcgauccauu

SEQ ID NO: 4515 - RNA, 21 nt, RNAi-antisense strand
uggaucgccguccucaccuuu

SEQ ID NO: 4516 - DNA, 21 bp, Homo sapiens
gaggacggcgatccatcgtca

SEQ ID NO: 4517 - RNA, 21 nt, RNAi-sense strand
ggacggcgauccaucgucauu

SEQ ID NO: 4518 - RNA, 21 nt, RNAi-antisense strand
ugacgauggaucgccguccuu

SEQ ID NO: 4519 - DNA, 21 bp, Homo sapiens
gagagcatcctggacgagcac

SEQ ID NO: 4520 - RNA, 21 nt, RNAi-sense strand
gagcauccuggacgagcacuu

SEQ ID NO: 4521 - RNA, 21 nt, RNAi-antisense strand
gugcucguccaggaugcucuu

SEQ ID NO: 4522 - DNA, 21 bp, Homo sapiens
gagcatcctggacgagcacgt

SEQ ID NO: 4523 - RNA, 21 nt, RNAi-sense strand
gcauccuggacgagcacguuu

SEQ ID NO: 4524 - RNA, 21 nt, RNAi-antisense strand
acgugcucguccaggaugcuu

SEQ ID NO: 4525 - DNA, 21 bp, Homo sapiens
gacgagcacgtacagcgtgtg

SEQ ID NO: 4526 - RNA, 21 nt, RNAi-sense strand
cgagcacguacagcguguguu

SEQ ID NO: 4527 - RNA, 21 nt, RNAi-antisense strand
cacacgcuguacgugcucguu

SEQ ID NO: 4528 - DNA, 21 bp, Homo sapiens
gagcacgtacagcgtgtgctg

SEQ ID NO: 4529 - RNA, 21 nt, RNAi-sense strand
gcacguacagcgugugcuguu

SEQ ID NO: 4530 - RNA, 21 nt, RNAi-antisense strand
cagcacacgcuguacgugcuu

SEQ ID NO: 4531 - DNA, 21 bp, Homo sapiens
gaggctactcagagagtgttg

SEQ ID NO: 4532 - RNA, 21 nt, RNAi-sense strand
ggcuacucagagaguguuguu

SEQ ID NO: 4533 - RNA, 21 nt, RNAi-antisense strand
caacacucucugaguagccuu

SEQ ID NO: 4534 - DNA, 21 bp, Homo sapiens
gaaatgccaagaaggctgagt

SEQ ID NO: 4535 - RNA, 21 nt, RNAi-sense strand
aaugccaagaaggcugaguuu

SEQ ID NO: 4536 - RNA, 21 nt, RNAi-antisense strand
acucagccuucuuggcauuuu

SEQ ID NO: 4537 - DNA, 21 bp, Homo sapiens
gaggatgcggagaagaaccag

SEQ ID NO: 4538 - RNA, 21 nt, RNAi-sense strand
ggaugcggagaagaaccaguu

SEQ ID NO: 4539 - RNA, 21 nt, RNAi-antisense strand
cugguucuucuccgcauccuu

SEQ ID NO: 4540 - DNA, 21 bp, Homo sapiens
gatgcggagaagaaccagaaa

SEQ ID NO: 4541 - RNA, 21 nt, RNAi-sense strand
ugcggagaagaaccagaaauu

SEQ ID NO: 4542 - RNA, 21 nt, RNAi-antisense strand
uuucugguucuucuccgcauu

SEQ ID NO: 4543 - DNA, 21 bp, Homo sapiens
gacgtctggaggaggaagaaa

SEQ ID NO: 4544 - RNA, 21 nt, RNAi-sense strand
cgucuggaggaggaagaaauu

SEQ ID NO: 4545 - RNA, 21 nt, RNAi-antisense strand
uuucuuccuccuccagacguu

SEQ ID NO: 4546 - DNA, 21 bp, Homo sapiens
gaggtatgtgcaggaggttat

SEQ ID NO: 4547 - RNA, 21 nt, RNAi-sense strand
gguaugugcaggagguuauuu

SEQ ID NO: 4548 - RNA, 21 nt, RNAi-antisense strand
auaaccuccugcacauaccuu

SEQ ID NO: 4549 - DNA, 21 bp, Homo sapiens
gacatggagctctccgagaca

SEQ ID NO: 4550 - RNA, 21 nt, RNAi-sense strand
cauggagcucuccgagacauu

SEQ ID NO: 4551 - RNA, 21 nt, RNAi-antisense strand
ugucucggagagcuccauguu

SEQ ID NO: 4552 - DNA, 21 bp, Homo sapiens
gagctctccgagacagagaca

SEQ ID NO: 4553 - RNA, 21 nt, RNAi-sense strand
gcucuccgagacagagacauu

SEQ ID NO: 4554 - RNA, 21 nt, RNAi-antisense strand
ugucucugucucggagagcuu

SEQ ID NO: 4555 - DNA, 21 bp, Homo sapiens
gagacagagacaagatcgcag

SEQ ID NO: 4556 - RNA, 21 nt, RNAi-sense strand
gacagagacaagaucgcaguu

SEQ ID NO: 4557 - RNA, 21 nt, RNAi-antisense strand
cugcgaucuugucucugucuu

SEQ ID NO: 4558 - DNA, 21 bp, Homo sapiens
gacagagacaagatcgcagag

SEQ ID NO: 4559 - RNA, 21 nt, RNAi-sense strand
cagagacaagaucgcagaguu

SEQ ID NO: 4560 - RNA, 21 nt, RNAi-antisense strand
cucugcgaucuugucucuguu

SEQ ID NO: 4561 - DNA, 21 bp, Homo sapiens
gagacaagatcgcagaggaag

SEQ ID NO: 4562 - RNA, 21 nt, RNAi-sense strand
gacaagaucgcagaggaaguu

SEQ ID NO: 4563 - RNA, 21 nt, RNAi-antisense strand
cuuccucugcgaucuugucuu

SEQ ID NO: 4564 - DNA, 21 bp, Homo sapiens
gacaagatcgcagaggaaggt

SEQ ID NO: 4565 - RNA, 21 nt, RNAi-sense strand
caagaucgcagaggaagguuu

SEQ ID NO: 4566 - RNA, 21 nt, RNAi-antisense strand
accuuccucugcgaucuuguu

SEQ ID NO: 4567 - DNA, 21 bp, Homo sapiens
gacagcatcgttgtggcgtac

SEQ ID NO: 4568 - RNA, 21 nt, RNAi-sense strand
cagcaucguuguggcguacuu

SEQ ID NO: 4569 - RNA, 21 nt, RNAi-antisense strand
guacgccacaacgaugcuguu

SEQ ID NO: 4570 - DNA, 21 bp, Homo sapiens
gatactacttcaagaaagtga

SEQ ID NO: 4571 - RNA, 21 nt, RNAi-sense strand
uacuacuucaagaaagugauu

SEQ ID NO: 4572 - RNA, 21 nt, RNAi-antisense strand
ucacuuucuugaaguaguauu

SEQ ID NO: 4573 - DNA, 21 bp, Homo sapiens
gaaagtgagcgacgagtttga

SEQ ID NO: 4574 - RNA, 21 nt, RNAi-sense strand
aagugagcgacgaguuugauu

SEQ ID NO: 4575 - RNA, 21 nt, RNAi-antisense strand
ucaaacucgucgcucacuuuu

SEQ ID NO: 4576 - DNA, 21 bp, Homo sapiens
gagcgacgagtttgactgtgg

SEQ ID NO: 4577 - RNA, 21 nt, RNAi-sense strand
gcgacgaguuugacugugguu

SEQ ID NO: 4578 - RNA, 21 nt, RNAi-antisense strand
ccacagucaaacucgucgcuu

SEQ ID NO: 4579 - DNA, 21 bp, Homo sapiens
gaggaggttcgagaggacgag

SEQ ID NO: 4580 - RNA, 21 nt, RNAi-sense strand
ggagguucgagaggacgaguu

SEQ ID NO: 4581 - RNA, 21 nt, RNAi-antisense strand
cucguccucucgaaccuccuu

SEQ ID NO: 4582 - DNA, 21 bp, Homo sapiens
gaggagaagatcatcggcaaa

SEQ ID NO: 4583 - RNA, 21 nt, RNAi-sense strand
ggagaagaucaucggcaaauu

SEQ ID NO: 4584 - RNA, 21 nt, RNAi-antisense strand
uuugccgaugaucuucuccuu

SEQ ID NO: 4585 - DNA, 21 bp, Homo sapiens
gagaagatcatcggcaaagtg

SEQ ID NO: 4586 - RNA, 21 nt, RNAi-sense strand
gaagaucaucggcaaaguguu

SEQ ID NO: 4587 - RNA, 21 nt, RNAi-antisense strand
cacuuugccgaugaucuucuu

SEQ ID NO: 4588 - DNA, 21 bp, Homo sapiens
gaagatcatcggcaaagtgga

SEQ ID NO: 4589 - RNA, 21 nt, RNAi-sense strand
agaucaucggcaaaguggauu

SEQ ID NO: 4590 - RNA, 21 nt, RNAi-antisense strand
uccacuuugccgaugaucuuu

SEQ ID NO: 4591 - DNA, 21 bp, Homo sapiens
gatcatcggcaaagtggagaa

SEQ ID NO: 4592 - RNA, 21 nt, RNAi-sense strand
ucaucggcaaaguggagaauu

SEQ ID NO: 4593 - RNA, 21 nt, RNAi-antisense strand
uucuccacuuugccgaugauu

SEQ ID NO: 4594 - DNA, 21 bp, Homo sapiens
gagaaggtggactgataggct

SEQ ID NO: 4595 - RNA, 21 nt, RNAi-sense strand
gaagguggacugauaggcuuu

SEQ ID NO: 4596 - RNA, 21 nt, RNAi-antisense strand
agccuaucaguccaccuucuu

SEQ ID NO: 4597 - DNA, 21 bp, Homo sapiens
gaaggtggactgataggctgg

SEQ ID NO: 4598 - RNA, 21 nt, RNAi-sense strand
agguggacugauaggcugguu

SEQ ID NO: 4599 - RNA, 21 nt, RNAi-antisense strand
ccagccuaucaguccaccuuu

SEQ ID NO: 4600 - DNA, 21 bp, Homo sapiens
gatgacctcgtactcaggagc

SEQ ID NO: 4601 - RNA, 21 nt, RNAi-sense strand
ugaccucguacucaggagcuu

SEQ ID NO: 4602 - RNA, 21 nt, RNAi-antisense strand
gcuccugaguacgaggucauu

SEQ ID NO: 4603 - DNA, 21 bp, Homo sapiens
gaccactcctcatagcaatac

SEQ ID NO: 4604 - RNA, 21 nt, RNAi-sense strand
ccacuccucauagcaauacuu

SEQ ID NO: 4605 - RNA, 21 nt, RNAi-antisense strand
guauugcuaugaggagugguu

SEQ ID NO: 4606 - DNA, 21 bp, Homo sapiens
gagtgccttcaacacagcttg

SEQ ID NO: 4607 - RNA, 21 nt, RNAi-sense strand
gugccuucaacacagcuuguu

SEQ ID NO: 4608 - RNA, 21 nt, RNAi-antisense strand
caagcuguguugaaggcacuu

SEQ ID NO: 4609 - DNA, 21 bp, Homo sapiens
taaaggtgagacttcgacggc

SEQ ID NO: 4610 - RNA, 21 nt, RNAi-sense strand
aaggugagacuucgacggcuu

SEQ ID NO: 4611 - RNA, 21 nt, RNAi-antisense strand
gccgucgaagucucaccuuuu

SEQ ID NO: 4612 - DNA, 21 bp, Homo sapiens
taagcctgttcaggactttcc

SEQ ID NO: 4613 - RNA, 21 nt, RNAi-sense strand
agccuguucaggacuuuccuu

SEQ ID NO: 4614 - RNA, 21 nt, RNAi-antisense strand
ggaaaguccugaacaggcuuu

SEQ ID NO: 4615 - DNA, 21 bp, Homo sapiens
taccgaaagtacattcttgat

SEQ ID NO: 4616 - RNA, 21 nt, RNAi-sense strand
ccgaaaguacauucuugauuu

SEQ ID NO: 4617 - RNA, 21 nt, RNAi-antisense strand
aucaagaauguacuuucgguu

SEQ ID NO: 4618 - DNA, 21 bp, Homo sapiens
tacattcttgataacaatggc

SEQ ID NO: 4619 - RNA, 21 nt, RNAi-sense strand
cauucuugauaacaauggcuu

SEQ ID NO: 4620 - RNA, 21 nt, RNAi-antisense strand
gccauuguuaucaagaauguu

SEQ ID NO: 4621 - DNA, 21 bp, Homo sapiens
tatttggaatatacgaggaca

SEQ ID NO: 4622 - RNA, 21 nt, RNAi-sense strand
uuuggaauauacgaggacauu

SEQ ID NO: 4623 - RNA, 21 nt, RNAi-antisense strand
uguccucguauauuccaaauu

SEQ ID NO: 4624 - DNA, 21 bp, Homo sapiens
tatacgaggacaggctcggag

SEQ ID NO: 4625 - RNA, 21 nt, RNAi-sense strand
uacgaggacaggcucggaguu

SEQ ID NO: 4626 - RNA, 21 nt, RNAi-antisense strand
cuccgagccuguccucguauu

SEQ ID NO: 4627 - DNA, 21 bp, Homo sapiens
tacgaggacaggctcggagag

SEQ ID NO: 4628 - RNA, 21 nt, RNAi-sense strand
cgaggacaggcucggagaguu

SEQ ID NO: 4629 - RNA, 21 nt, RNAi-antisense strand
cucuccgagccuguccucguu

SEQ ID NO: 4630 - DNA, 21 bp, Homo sapiens
tatctggatacctgccgacct

SEQ ID NO: 4631 - RNA, 21 nt, RNAi-sense strand
ucuggauaccugccgaccuuu

SEQ ID NO: 4632 - RNA, 21 nt, RNAi-antisense strand
aggucggcagguauccagauu

SEQ ID NO: 4633 - DNA, 21 bp, Homo sapiens
tacctgccgaccttaaatgaa

SEQ ID NO: 4634 - RNA, 21 nt, RNAi-sense strand
ccugccgaccuuaaaugaauu

SEQ ID NO: 4635 - RNA, 21 nt, RNAi-antisense strand
uucauuuaaggucggcagguu

SEQ ID NO: 4636 - DNA, 21 bp, Homo sapiens
taaatgaagatgaggaatgga

SEQ ID NO: 4637 - RNA, 21 nt, RNAi-sense strand
aaugaagaugaggaauggauu

SEQ ID NO: 4638 - RNA, 21 nt, RNAi-antisense strand
uccauuccucaucuucauuuu

SEQ ID NO: 4639 - DNA, 21 bp, Homo sapiens
tagacggtacagcgaaggcag

SEQ ID NO: 4640 - RNA, 21 nt, RNAi-sense strand
gacgguacagcgaaggcaguu

SEQ ID NO: 4641 - RNA, 21 nt, RNAi-antisense strand
cugccuucgcuguaccgucuu

SEQ ID NO: 4642 - DNA, 21 bp, Homo sapiens
tacagcgaaggcagagagttc

SEQ ID NO: 4643 - RNA, 21 nt, RNAi-sense strand
cagcgaaggcagagaguucuu

SEQ ID NO: 4644 - RNA, 21 nt, RNAi-antisense strand
gaacucucugccuucgcuguu

SEQ ID NO: 4645 - DNA, 21 bp, Homo sapiens
tattatgtcaatgccggctat

SEQ ID NO: 4646 - RNA, 21 nt, RNAi-sense strand
uuaugucaaugccggcuauuu

SEQ ID NO: 4647 - RNA, 21 nt, RNAi-antisense strand
auagccggcauugacauaauu

SEQ ID NO: 4648 - DNA, 21 bp, Homo sapiens
tatgtcaatgccggctatgcc

SEQ ID NO: 4649 - RNA, 21 nt, RNAi-sense strand
ugucaaugccggcuaugccuu

SEQ ID NO: 4650 - RNA, 21 nt, RNAi-antisense strand
ggcauagccggcauugacauu

SEQ ID NO: 4651 - DNA, 21 bp, Homo sapiens
tacaggatccgtaagcagcac

SEQ ID NO: 4652 - RNA, 21 nt, RNAi-sense strand
caggauccguaagcagcacuu

SEQ ID NO: 4653 - RNA, 21 nt, RNAi-antisense strand
gugcugcuuacggauccuguu

SEQ ID NO: 4654 - DNA, 21 bp, Homo sapiens
tacagcgtgtgctgaggacac

SEQ ID NO: 4655 - RNA, 21 nt, RNAi-sense strand
cagcgugugcugaggacacuu

SEQ ID NO: 4656 - RNA, 21 nt, RNAi-antisense strand
guguccucagcacacgcuguu

SEQ ID NO: 4657 - DNA, 21 bp, Homo sapiens
tactcagagagtgttggcgct

SEQ ID NO: 4658 - RNA, 21 nt, RNAi-sense strand
cucagagaguguuggcgcuuu

SEQ ID NO: 4659 - RNA, 21 nt, RNAi-antisense strand
agcgccaacacucucugaguu

SEQ ID NO: 4660 - DNA, 21 bp, Homo sapiens
tatgtgcaggaggttatgcgg

SEQ ID NO: 4661 - RNA, 21 nt, RNAi-sense strand
ugugcaggagguuaugcgguu

SEQ ID NO: 4662 - RNA, 21 nt, RNAi-antisense strand
ccgcauaaccuccugcacauu

SEQ ID NO: 4663 - DNA, 21 bp, Homo sapiens
taccagccgtgtcggacatgg

SEQ ID NO: 4664 - RNA, 21 nt, RNAi-sense strand
ccagccgugucggacaugguu

SEQ ID NO: 4665 - RNA, 21 nt, RNAi-antisense strand
ccauguccgacacggcugguu

SEQ ID NO: 4666 - DNA, 21 bp, Homo sapiens
tactacttcaagaaagtgagc

SEQ ID NO: 4667 - RNA, 21 nt, RNAi-sense strand
cuacuucaagaaagugagcuu

SEQ ID NO: 4668 - RNA, 21 nt, RNAi-antisense strand
gcucacuuucuugaaguaguu

SEQ ID NO: 4669 - DNA, 21 bp, Homo sapiens
tacttcaagaaagtgagcgac

SEQ ID NO: 4670 - RNA, 21 nt, RNAi-sense strand
cuucaagaaagugagcgacuu

SEQ ID NO: 4671 - RNA, 21 nt, RNAi-antisense strand
gucgcucacuuucuugaaguu

SEQ ID NO: 4672 - DNA, 21 bp, Homo sapiens
tatgtacatttctcaggctag

SEQ ID NO: 4673 - RNA, 21 nt, RNAi-sense strand
uguacauuucucaggcuaguu

SEQ ID NO: 4674 - RNA, 21 nt, RNAi-antisense strand
cuagccugagaaauguacauu

SEQ ID NO: 4675 - DNA, 21 bp, Homo sapiens
tacatttctcaggctaggcca

SEQ ID NO: 4676 - RNA, 21 nt, RNAi-sense strand
cauuucucaggcuaggccauu

SEQ ID NO: 4677 - RNA, 21 nt, RNAi-antisense strand
uggccuagccugagaaauguu

SEQ ID NO: 4678 - DNA, 21 bp, Homo sapiens
aagaaagtgagcgacgagttt

SEQ ID NO: 4679 - RNA, 21 nt, RNAi-sense strand
gaaagugagcgacgaguuuuu

SEQ ID NO: 4680 - RNA, 21 nt, RNAi-antisense strand
aaacucgucgcucacuuucuu

SEQ ID NO: 4681 - DNA, 21 bp, Homo sapiens
cattaaaggtgagacttcgac

SEQ ID NO: 4682 - RNA, 21 nt, RNAi-sense strand
uuaaaggugagacuucgacuu

SEQ ID NO: 4683 - RNA, 21 nt, RNAi-antisense strand
gucgaagucucaccuuuaauu

SEQ ID NO: 4684 - DNA, 21 bp, Homo sapiens
catatctggatacctgccgac

SEQ ID NO: 4685 - RNA, 21 nt, RNAi-sense strand
uaucuggauaccugccgacuu

SEQ ID NO: 4686 - RNA, 21 nt, RNAi-antisense strand
gucggcagguauccagauauu

SEQ ID NO: 4687 - DNA, 21 bp, Homo sapiens
cagaggtatgtgcaggaggtt

SEQ ID NO: 4688 - RNA, 21 nt, RNAi-sense strand
gagguaugugcaggagguuuu

SEQ ID NO: 4689 - RNA, 21 nt, RNAi-antisense strand
aaccuccugcacauaccucuu

SEQ ID NO: 4690 - DNA, 21 bp, Homo sapiens
cagcatcgttgtggcgtacta

SEQ ID NO: 4691 - RNA, 21 nt, RNAi-sense strand
gcaucguuguggcguacuauu

SEQ ID NO: 4692 - RNA, 21 nt, RNAi-antisense strand
uaguacgccacaacgaugcuu

SEQ ID NO: 4693 - DNA, 21 bp, Homo sapiens
catcgttgtggcgtactactt

SEQ ID NO: 4694 - RNA, 21 nt, RNAi-sense strand
ucguuguggcguacuacuuuu

SEQ ID NO: 4695 - RNA, 21 nt, RNAi-antisense strand
aaguaguacgccacaacgauu

SEQ ID NO: 4696 - DNA, 21 bp, Homo sapiens
cagctacagatactacttcaa

SEQ ID NO: 4697 - RNA, 21 nt, RNAi-sense strand
gcuacagauacuacuucaauu

SEQ ID NO: 4698 - RNA, 21 nt, RNAi-antisense strand
uugaaguaguaucuguagcuu

SEQ ID NO: 4699 - DNA, 21 bp, Homo sapiens
caagaaagtgagcgacgagtt

SEQ ID NO: 4700 - RNA, 21 nt, RNAi-sense strand
agaaagugagcgacgaguuuu

SEQ ID NO: 4701 - RNA, 21 nt, RNAi-antisense strand
aacucgucgcucacuuucuuu

SEQ ID NO: 4702 - DNA, 21 bp, Homo sapiens
gaaaggtgttggcattaaagg

SEQ ID NO: 4703 - RNA, 21 nt, RNAi-sense strand
aagguguuggcauuaaagguu

SEQ ID NO: 4704 - RNA, 21 nt, RNAi-antisense strand
ccuuuaaugccaacaccuuuu

SEQ ID NO: 4705 - DNA, 21 bp, Homo sapiens
gagagccatctaccgaaagta

SEQ ID NO: 4706 - RNA, 21 nt, RNAi-sense strand
gagccaucuaccgaaaguauu

SEQ ID NO: 4707 - RNA, 21 nt, RNAi-antisense strand
uacuuucgguagauggcucuu

SEQ ID NO: 4708 - DNA, 21 bp, Homo sapiens
gagccatctaccgaaagtaca

SEQ ID NO: 4709 - RNA, 21 nt, RNAi-sense strand
gccaucuaccgaaaguacauu

SEQ ID NO: 4710 - RNA, 21 nt, RNAi-antisense strand
uguacuuucgguagauggcuu

SEQ ID NO: 4711 - DNA, 21 bp, Homo sapiens
gataacaatggcatcgtgtcc

SEQ ID NO: 4712 - RNA, 21 nt, RNAi-sense strand
uaacaauggcaucguguccuu

SEQ ID NO: 4713 - RNA, 21 nt, RNAi-antisense strand
ggacacgaugccauuguuauu

SEQ ID NO: 4714 - DNA, 21 bp, Homo sapiens
gaccgaaatccaggccactat

SEQ ID NO: 4715 - RNA, 21 nt, RNAi-sense strand
ccgaaauccaggccacuauuu

SEQ ID NO: 4716 - RNA, 21 nt, RNAi-antisense strand
auaguggccuggauuucgguu

SEQ ID NO: 4717 - DNA, 21 bp, Homo sapiens
gaaatccaggccactatggag

SEQ ID NO: 4718 - RNA, 21 nt, RNAi-sense strand
aauccaggccacuauggaguu

SEQ ID NO: 4719 - RNA, 21 nt, RNAi-antisense strand
cuccauaguggccuggauuuu

SEQ ID NO: 4720 - DNA, 21 bp, Homo sapiens
gatacctgccgaccttaaatg

SEQ ID NO: 4721 - RNA, 21 nt, RNAi-sense strand
uaccugccgaccuuaaauguu

SEQ ID NO: 4722 - RNA, 21 nt, RNAi-antisense strand
cauuuaaggucggcagguauu

SEQ ID NO: 4723 - DNA, 21 bp, Homo sapiens
gaggctactcagagagtgttg

SEQ ID NO: 4724 - RNA, 21 nt, RNAi-sense strand
ggcuacucagagaguguuguu

SEQ ID NO: 4725 - RNA, 21 nt, RNAi-antisense strand
caacacucucugaguagccuu

SEQ ID NO: 4726 - DNA, 21 bp, Homo sapiens
tatttggaatatacgaggaca

SEQ ID NO: 4727 - RNA, 21 nt, RNAi-sense strand
uuuggaauauacgaggacauu

SEQ ID NO: 4728 - RNA, 21 nt, RNAi-antisense strand
uguccucguauauuccaaauu

SEQ ID NO: 4729 - DNA, 21 bp, Homo sapiens
tattatgtcaatgccggctat

SEQ ID NO: 4730 - RNA, 21 nt, RNAi-sense strand
uuaugucaaugccggcuauuu

SEQ ID NO: 4731 - RNA, 21 nt, RNAi-antisense strand
auagccggcauugacauaauu

SEQ ID NO: 4732 - DNA, 21 bp, Homo sapiens
aaatgaatatccaagagcagg

SEQ ID NO: 4733 - RNA, 21 nt, RNAi-sense strand
augaauauccaagagcagguu

SEQ ID NO: 4734 - RNA, 21 nt, RNAi-antisense strand
ccugcucuuggauauucauuu

SEQ ID NO: 4735 - DNA, 21 bp, Homo sapiens
aagtttcaccgaagatgctcc

SEQ ID NO: 4736 - RNA, 21 nt, RNAi-sense strand
guuucaccgaagaugcuccuu

SEQ ID NO: 4737 - RNA, 21 nt, RNAi-antisense strand
ggagcaucuucggugaaacuu

SEQ ID NO: 4738 - DNA, 21 bp, Homo sapiens
aaaggtgttggcattaaaggt

SEQ ID NO: 4739 - RNA, 21 nt, RNAi-sense strand
agguguuggcauuaaagguuu

SEQ ID NO: 4740 - RNA, 21 nt, RNAi-antisense strand
accuuuaaugccaacaccuuu

SEQ ID NO: 4741 - DNA, 21 bp, Homo sapiens
aaggtgttggcattaaaggtg

SEQ ID NO: 4742 - RNA, 21 nt, RNAi-sense strand
gguguuggcauuaaagguguu

SEQ ID NO: 4743 - RNA, 21 nt, RNAi-antisense strand
caccuuuaaugccaacaccuu

SEQ ID NO: 4744 - DNA, 21 bp, Homo sapiens
aaaggtgagacttcgacggcc

SEQ ID NO: 4745 - RNA, 21 nt, RNAi-sense strand
aggugagacuucgacggccuu

SEQ ID NO: 4746 - RNA, 21 nt, RNAi-antisense strand
ggccgucgaagucucaccuuu

SEQ ID NO: 4747 - DNA, 21 bp, Homo sapiens
aaggtgagacttcgacggcca

SEQ ID NO: 4748 - RNA, 21 nt, RNAi-sense strand
ggugagacuucgacggccauu

SEQ ID NO: 4749 - RNA, 21 nt, RNAi-antisense strand
uggccgucgaagucucaccuu

SEQ ID NO: 4750 - DNA, 21 bp, Homo sapiens
aagcctgttcaggactttcct

SEQ ID NO: 4751 - RNA, 21 nt, RNAi-sense strand
gccuguucaggacuuuccuuu

SEQ ID NO: 4752 - RNA, 21 nt, RNAi-antisense strand
aggaaaguccugaacaggcuu

SEQ ID NO: 4753 - DNA, 21 bp, Homo sapiens
aacgaggagaagaggctgaag

SEQ ID NO: 4754 - RNA, 21 nt, RNAi-sense strand
cgaggagaagaggcugaaguu

SEQ ID NO: 4755 - RNA, 21 nt, RNAi-antisense strand
cuucagccucuucuccucguu

SEQ ID NO: 4756 - DNA, 21 bp, Homo sapiens
aagaggctgaagctggcgaga

SEQ ID NO: 4757 - RNA, 21 nt, RNAi-sense strand
gaggcugaagcuggcgagauu

SEQ ID NO: 4758 - RNA, 21 nt, RNAi-antisense strand
ucucgccagcuucagccucuu

SEQ ID NO: 4759 - DNA, 21 bp, Homo sapiens
aagctggcgagagccatctac

SEQ ID NO: 4760 - RNA, 21 nt, RNAi-sense strand
gcuggcgagagccaucuacuu

SEQ ID NO: 4761 - RNA, 21 nt, RNAi-antisense strand
guagauggcucucgccagcuu

SEQ ID NO: 4762 - DNA, 21 bp, Homo sapiens
aagccagccaccaagagcttc

SEQ ID NO: 4763 - RNA, 21 nt, RNAi-sense strand
gccagccaccaagagcuucuu

SEQ ID NO: 4764 - RNA, 21 nt, RNAi-antisense strand
gaagcucuugguggcuggcuu

SEQ ID NO: 4765 - DNA, 21 bp, Homo sapiens
aagcagctgatcgatcctgcc

SEQ ID NO: 4766 - RNA, 21 nt, RNAi-sense strand
gcagcugaucgauccugccuu

SEQ ID NO: 4767 - RNA, 21 nt, RNAi-antisense strand
ggcaggaucgaucagcugcuu

SEQ ID NO: 4768 - DNA, 21 bp, Homo sapiens
aaatccaggccactatggagg

SEQ ID NO: 4769 - RNA, 21 nt, RNAi-sense strand
auccaggccacuauggagguu

SEQ ID NO: 4770 - RNA, 21 nt, RNAi-antisense strand
ccuccauaguggccuggauuu

SEQ ID NO: 4771 - DNA, 21 bp, Homo sapiens
aatccaggccactatggagga

SEQ ID NO: 4772 - RNA, 21 nt, RNAi-sense strand
uccaggccacuauggaggauu

SEQ ID NO: 4773 - RNA, 21 nt, RNAi-antisense strand
uccuccauaguggccuggauu

SEQ ID NO: 4774 - DNA, 21 bp, Homo sapiens
aatatacgaggacaggctcgg

SEQ ID NO: 4775 - RNA, 21 nt, RNAi-sense strand
uauacgaggacaggcucgguu

SEQ ID NO: 4776 - RNA, 21 nt, RNAi-antisense strand
ccgagccuguccucguauauu

SEQ ID NO: 4777 - DNA, 21 bp, Homo sapiens
aaagtctgtagtgaccagagc

SEQ ID NO: 4778 - RNA, 21 nt, RNAi-sense strand
agucuguagugaccagagcuu

SEQ ID NO: 4779 - RNA, 21 nt, RNAi-antisense strand
gcucuggucacuacagacuuu

SEQ ID NO: 4780 - DNA, 21 bp, Homo sapiens
aagtctgtagtgaccagagct

SEQ ID NO: 4781 - RNA, 21 nt, RNAi-sense strand
gucuguagugaccagagcuuu

SEQ ID NO: 4782 - RNA, 21 nt, RNAi-antisense strand
agcucuggucacuacagacuu

SEQ ID NO: 4783 - DNA, 21 bp, Homo sapiens
aaatgaagatgaggaatggaa

SEQ ID NO: 4784 - RNA, 21 nt, RNAi-sense strand
augaagaugaggaauggaauu

SEQ ID NO: 4785 - RNA, 21 nt, RNAi-antisense strand
uuccauuccucaucuucauuu

SEQ ID NO: 4786 - DNA, 21 bp, Homo sapiens
aatgaagatgaggaatggaag

SEQ ID NO: 4787 - RNA, 21 nt, RNAi-sense strand
ugaagaugaggaauggaaguu

SEQ ID NO: 4788 - RNA, 21 nt, RNAi-antisense strand
cuuccauuccucaucuucauu

SEQ ID NO: 4789 - DNA, 21 bp, Homo sapiens
aagatgaggaatggaagtgtg

SEQ ID NO: 4790 - RNA, 21 nt, RNAi-sense strand
gaugaggaauggaaguguguu

SEQ ID NO: 4791 - RNA, 21 nt, RNAi-antisense strand
cacacuuccauuccucaucuu

SEQ ID NO: 4792 - DNA, 21 bp, Homo sapiens
aatggaagtgtgaccaggaca

SEQ ID NO: 4793 - RNA, 21 nt, RNAi-sense strand
uggaagugugaccaggacauu

SEQ ID NO: 4794 - RNA, 21 nt, RNAi-antisense strand
uguccuggucacacuuccauu

SEQ ID NO: 4795 - DNA, 21 bp, Homo sapiens
aagtgtgaccaggacatggat

SEQ ID NO: 4796 - RNA, 21 nt, RNAi-sense strand
gugugaccaggacauggauuu

SEQ ID NO: 4797 - RNA, 21 nt, RNAi-antisense strand
auccauguccuggucacacuu

SEQ ID NO: 4798 - DNA, 21 bp, Homo sapiens
aagctgctcctggagacagct

SEQ ID NO: 4799 - RNA, 21 nt, RNAi-sense strand
gcugcuccuggagacagcuuu

SEQ ID NO: 4800 - RNA, 21 nt, RNAi-antisense strand
agcugucuccaggagcagcuu

SEQ ID NO: 4801 - DNA, 21 bp, Homo sapiens
aaggcagagagttcaggtatg

SEQ ID NO: 4802 - RNA, 21 nt, RNAi-sense strand
ggcagagaguucagguauguu

SEQ ID NO: 4803 - RNA, 21 nt, RNAi-antisense strand
cauaccugaacucucugccuu

SEQ ID NO: 4804 - DNA, 21 bp, Homo sapiens
aacgacagcgagcagcagagc

SEQ ID NO: 4805 - RNA, 21 nt, RNAi-sense strand
cgacagcgagcagcagagcuu

SEQ ID NO: 4806 - RNA, 21 nt, RNAi-antisense strand
gcucugcugcucgcugucguu

SEQ ID NO: 4807 - DNA, 21 bp, Homo sapiens
aagttcgcggaggagctcatc

SEQ ID NO: 4808 - RNA, 21 nt, RNAi-sense strand
guucgcggaggagcucaucuu

SEQ ID NO: 4809 - RNA, 21 nt, RNAi-antisense strand
gaugagcuccuccgcgaacuu

SEQ ID NO: 4810 - DNA, 21 bp, Homo sapiens
aagctggaggagcggctgaag

SEQ ID NO: 4811 - RNA, 21 nt, RNAi-sense strand
gcuggaggagcggcugaaguu

SEQ ID NO: 4812 - RNA, 21 nt, RNAi-antisense strand
cuucagccgcuccuccagcuu

SEQ ID NO: 4813 - DNA, 21 bp, Homo sapiens
aaggtgaggacggcgatccat

SEQ ID NO: 4814 - RNA, 21 nt, RNAi-sense strand
ggugaggacggcgauccauuu

SEQ ID NO: 4815 - RNA, 21 nt, RNAi-antisense strand
auggaucgccguccucaccuu

SEQ ID NO: 4816 - DNA, 21 bp, Homo sapiens
aaagaaatgccaagaaggctg

SEQ ID NO: 4817 - RNA, 21 nt, RNAi-sense strand
agaaaugccaagaaggcuguu

SEQ ID NO: 4818 - RNA, 21 nt, RNAi-antisense strand
cagccuucuuggcauuucuuu

SEQ ID NO: 4819 - DNA, 21 bp, Homo sapiens
aagaaatgccaagaaggctga

SEQ ID NO: 4820 - RNA, 21 nt, RNAi-sense strand
gaaaugccaagaaggcugauu

SEQ ID NO: 4821 - RNA, 21 nt, RNAi-antisense strand
ucagccuucuuggcauuucuu

SEQ ID NO: 4822 - DNA, 21 bp, Homo sapiens
aaatgccaagaaggctgagtc

SEQ ID NO: 4823 - RNA, 21 nt, RNAi-sense strand
augccaagaaggcugagucuu

SEQ ID NO: 4824 - RNA, 21 nt, RNAi-antisense strand
gacucagccuucuuggcauuu

SEQ ID NO: 4825 - DNA, 21 bp, Homo sapiens
aatgccaagaaggctgagtcg

SEQ ID NO: 4826 - RNA, 21 nt, RNAi-sense strand
ugccaagaaggcugagucguu

SEQ ID NO: 4827 - RNA, 21 nt, RNAi-antisense strand
cgacucagccuucuuggcauu

SEQ ID NO: 4828 - DNA, 21 bp, Homo sapiens
aaatcatgcagtggatcattg

SEQ ID NO: 4829 - RNA, 21 nt, RNAi-sense strand
aucaugcaguggaucauuguu

SEQ ID NO: 4830 - RNA, 21 nt, RNAi-antisense strand
caaugauccacugcaugauuu

SEQ ID NO: 4831 - DNA, 21 bp, Homo sapiens
aatcatgcagtggatcattga

SEQ ID NO: 4832 - RNA, 21 nt, RNAi-sense strand
ucaugcaguggaucauugauu

SEQ ID NO: 4833 - RNA, 21 nt, RNAi-antisense strand
ucaaugauccacugcaugauu

SEQ ID NO: 4834 - DNA, 21 bp, Homo sapiens
aaaggagatcagcaggcaccg

SEQ ID NO: 4835 - RNA, 21 nt, RNAi-sense strand
aggagaucagcaggcaccguu

SEQ ID NO: 4836 - RNA, 21 nt, RNAi-antisense strand
cggugccugcugaucuccuuu

SEQ ID NO: 4837 - DNA, 21 bp, Homo sapiens
aaggagatcagcaggcaccgc

SEQ ID NO: 4838 - RNA, 21 nt, RNAi-sense strand
ggagaucagcaggcaccgcuu

SEQ ID NO: 4839 - RNA, 21 nt, RNAi-antisense strand
gcggugccugcugaucuccuu

SEQ ID NO: 4840 - DNA, 21 bp, Homo sapiens
aaagagagccagccgagcacc

SEQ ID NO: 4841 - RNA, 21 nt, RNAi-sense strand
agagagccagccgagcaccuu

SEQ ID NO: 4842 - RNA, 21 nt, RNAi-antisense strand
ggugcucggcuggcucucuuu

SEQ ID NO: 4843 - DNA, 21 bp, Homo sapiens
aagcagaggacaagatcgcag

SEQ ID NO: 4844 - RNA, 21 nt, RNAi-sense strand
gcagaggacaagaucgcaguu

SEQ ID NO: 4845 - RNA, 21 nt, RNAi-antisense strand
cugcgaucuuguccucugcuu

SEQ ID NO: 4846 - DNA, 21 bp, Homo sapiens
aagaaagtgagcgacgagttt

SEQ ID NO: 4847 - RNA, 21 nt, RNAi-sense strand
gaaagugagcgacgaguuuuu

SEQ ID NO: 4848 - RNA, 21 nt, RNAi-antisense strand
aaacucgucgcucacuuucuu

SEQ ID NO: 4849 - DNA, 21 bp, Homo sapiens
aaagtgagcgacgagtttgac

SEQ ID NO: 4850 - RNA, 21 nt, RNAi-sense strand
agugagcgacgaguuugacuu

SEQ ID NO: 4851 - RNA, 21 nt, RNAi-antisense strand
gucaaacucgucgcucacuuu

SEQ ID NO: 4852 - DNA, 21 bp, Homo sapiens
aagtgagcgacgagtttgact

SEQ ID NO: 4853 - RNA, 21 nt, RNAi-sense strand
gugagcgacgaguuugacuuu

SEQ ID NO: 4854 - RNA, 21 nt, RNAi-antisense strand
agucaaacucgucgcucacuu

SEQ ID NO: 4855 - DNA, 21 bp, Homo sapiens
aagatcatcggcaaagtggag

SEQ ID NO: 4856 - RNA, 21 nt, RNAi-sense strand
gaucaucggcaaaguggaguu

SEQ ID NO: 4857 - RNA, 21 nt, RNAi-antisense strand
cuccacuuugccgaugaucuu

SEQ ID NO: 4858 - DNA, 21 bp, Homo sapiens
aaagtggagaaggtggactga

SEQ ID NO: 4859 - RNA, 21 nt, RNAi-sense strand
aguggagaagguggacugauu

SEQ ID NO: 4860 - RNA, 21 nt, RNAi-antisense strand
ucaguccaccuucuccacuuu

SEQ ID NO: 4861 - DNA, 21 bp, Homo sapiens
aagtggagaaggtggactgat

SEQ ID NO: 4862 - RNA, 21 nt, RNAi-sense strand
guggagaagguggacugauuu

SEQ ID NO: 4863 - RNA, 21 nt, RNAi-antisense strand
aucaguccaccuucuccacuu

SEQ ID NO: 4864 - DNA, 21 bp, Homo sapiens
aaggtggactgataggctggt

SEQ ID NO: 4865 - RNA, 21 nt, RNAi-sense strand
gguggacugauaggcugguuu

SEQ ID NO: 4866 - RNA, 21 nt, RNAi-antisense strand
accagccuaucaguccaccuu

SEQ ID NO: 4867 - DNA, 21 bp, Homo sapiens
aagtggtccacaagcttctgt

SEQ ID NO: 4868 - RNA, 21 nt, RNAi-sense strand
gugguccacaagcuucuguuu

SEQ ID NO: 4869 - RNA, 21 nt, RNAi-antisense strand
acagaagcuuguggaccacuu

SEQ ID NO: 4870 - DNA, 21 bp, Homo sapiens
aaggaggcagcctggaccact

SEQ ID NO: 4871 - RNA, 21 nt, RNAi-sense strand
ggaggcagccuggaccacuuu

SEQ ID NO: 4872 - RNA, 21 nt, RNAi-antisense strand
agugguccaggcugccuccuu

SEQ ID NO: 4873 - DNA, 21 bp, Homo sapiens
aattgtacgcgccaccgagtg

SEQ ID NO: 4874 - RNA, 21 nt, RNAi-sense strand
uuguacgcgccaccgaguguu

SEQ ID NO: 4875 - RNA, 21 nt, RNAi-antisense strand
cacucgguggcgcguacaauu

SEQ ID NO: 4876 - DNA, 21 bp, Homo sapiens
aacacagcttgtctcttgcct

SEQ ID NO: 4877 - RNA, 21 nt, RNAi-sense strand
cacagcuugucucuugccuuu

SEQ ID NO: 4878 - RNA, 21 nt, RNAi-antisense strand
aggcaagagacaagcuguguu

SEQ ID NO: 4879 - DNA, 21 bp, Homo sapiens
aatcggcgacggagcactgca

SEQ ID NO: 4880 - RNA, 21 nt, RNAi-sense strand
ucggcgacggagcacugcauu

SEQ ID NO: 4881 - RNA, 21 nt, RNAi-antisense strand
ugcagugcuccgucgccgauu

SEQ ID NO: 4882 - DNA, 21 bp, Homo sapiens
aaatatgtacatttctcaggc

SEQ ID NO: 4883 - RNA, 21 nt, RNAi-sense strand
auauguacauuucucaggcuu

SEQ ID NO: 4884 - RNA, 21 nt, RNAi-antisense strand
gccugagaaauguacauauuu

SEQ ID NO: 4885 - DNA, 21 bp, Homo sapiens
aatatgtacatttctcaggct

SEQ ID NO: 4886 - RNA, 21 nt, RNAi-sense strand
uauguacauuucucaggcuuu

SEQ ID NO: 4887 - RNA, 21 nt, RNAi-antisense strand
agccugagaaauguacauauu

SEQ ID NO: 4888 - DNA, 21 bp, Homo sapiens
cagattgattcactttggagc

SEQ ID NO: 4889 - RNA, 21 nt, RNAi-sense strand
gauugauucacuuuggagcuu

SEQ ID NO: 4890 - RNA, 21 nt, RNAi-antisense strand
gcuccaaagugaaucaaucuu

SEQ ID NO: 4891 - DNA, 21 bp, Homo sapiens
cactttggagctgtaagtact

SEQ ID NO: 4892 - RNA, 21 nt, RNAi-sense strand
cuuuggagcuguaaguacuuu

SEQ ID NO: 4893 - RNA, 21 nt, RNAi-antisense strand
aguacuuacagcuccaaaguu

SEQ ID NO: 4894 - DNA, 21 bp, Homo sapiens
cagcgctcattgttccttgac

SEQ ID NO: 4895 - RNA, 21 nt, RNAi-sense strand
gcgcucauuguuccuugacuu

SEQ ID NO: 4896 - RNA, 21 nt, RNAi-antisense strand
gucaaggaacaaugagcgcuu

SEQ ID NO: 4897 - DNA, 21 bp, Homo sapiens
cattgttccttgacgcagagt

SEQ ID NO: 4898 - RNA, 21 nt, RNAi-sense strand
uuguuccuugacgcagaguuu

SEQ ID NO: 4899 - RNA, 21 nt, RNAi-antisense strand
acucugcgucaaggaacaauu

SEQ ID NO: 4900 - DNA, 21 bp, Homo sapiens
caagtttcaccgaagatgctc

SEQ ID NO: 4901 - RNA, 21 nt, RNAi-sense strand
aguuucaccgaagaugcucuu

SEQ ID NO: 4902 - RNA, 21 nt, RNAi-antisense strand
gagcaucuucggugaaacuuu

SEQ ID NO: 4903 - DNA, 21 bp, Homo sapiens
cagctacagtttctgctccgg

SEQ ID NO: 4904 - RNA, 21 nt, RNAi-sense strand
gcuacaguuucugcuccgguu

SEQ ID NO: 4905 - RNA, 21 nt, RNAi-antisense strand
ccggagcagaaacuguagcuu

SEQ ID NO: 4906 - DNA, 21 bp, Homo sapiens
cattaaaggtgagacttcgac

SEQ ID NO: 4907 - RNA, 21 nt, RNAi-sense strand
uuaaaggugagacuucgacuu

SEQ ID NO: 4908 - RNA, 21 nt, RNAi-antisense strand
gucgaagucucaccuuuaauu

SEQ ID NO: 4909 - DNA, 21 bp, Homo sapiens
caggactttcctgaagcagga

SEQ ID NO: 4910 - RNA, 21 nt, RNAi-sense strand
ggacuuuccugaagcaggauu

SEQ ID NO: 4911 - RNA, 21 nt, RNAi-antisense strand
uccugcuucaggaaaguccuu

SEQ ID NO: 4912 - DNA, 21 bp, Homo sapiens
cactggcttcaggaagctgga

SEQ ID NO: 4913 - RNA, 21 nt, RNAi-sense strand
cuggcuucaggaagcuggauu

SEQ ID NO: 4914 - RNA, 21 nt, RNAi-antisense strand
uccagcuuccugaagccaguu

SEQ ID NO: 4915 - DNA, 21 bp, Homo sapiens
catctaccgaaagtacattct

SEQ ID NO: 4916 - RNA, 21 nt, RNAi-sense strand
ucuaccgaaaguacauucuuu

SEQ ID NO: 4917 - RNA, 21 nt, RNAi-antisense strand
agaauguacuuucgguagauu

SEQ ID NO: 4918 - DNA, 21 bp, Homo sapiens
cattcttgataacaatggcat

SEQ ID NO: 4919 - RNA, 21 nt, RNAi-sense strand
uucuugauaacaauggcauuu

SEQ ID NO: 4920 - RNA, 21 nt, RNAi-antisense strand
augccauuguuaucaagaauu

SEQ ID NO: 4921 - DNA, 21 bp, Homo sapiens
cagaccaagccagccaccaag

SEQ ID NO: 4922 - RNA, 21 nt, RNAi-sense strand
gaccaagccagccaccaaguu

SEQ ID NO: 4923 - RNA, 21 nt, RNAi-antisense strand
cuugguggcuggcuuggucuu

SEQ ID NO: 4924 - DNA, 21 bp, Homo sapiens
caagccagccaccaagagctt

SEQ ID NO: 4925 - RNA, 21 nt, RNAi-sense strand
agccagccaccaagagcuuuu

SEQ ID NO: 4926 - RNA, 21 nt, RNAi-antisense strand
aagcucuugguggcuggcuuu

SEQ ID NO: 4927 - DNA, 21 bp, Homo sapiens
cagccaccaagagcttcataa

SEQ ID NO: 4928 - RNA, 21 nt, RNAi-sense strand
gccaccaagagcuucauaauu

SEQ ID NO: 4929 - RNA, 21 nt, RNAi-antisense strand
uuaugaagcucuugguggcuu

SEQ ID NO: 4930 - DNA, 21 bp, Homo sapiens
catcatgaagcagctgatcga

SEQ ID NO: 4931 - RNA, 21 nt, RNAi-sense strand
ucaugaagcagcugaucgauu

SEQ ID NO: 4932 - RNA, 21 nt, RNAi-antisense strand
ucgaucagcugcuucaugauu

SEQ ID NO: 4933 - DNA, 21 bp, Homo sapiens
catgaagcagctgatcgatcc

SEQ ID NO: 4934 - RNA, 21 nt, RNAi-sense strand
ugaagcagcugaucgauccuu

SEQ ID NO: 4935 - RNA, 21 nt, RNAi-antisense strand
ggaucgaucagcugcuucauu

SEQ ID NO: 4936 - DNA, 21 bp, Homo sapiens
cagctgatcgatcctgccatg

SEQ ID NO: 4937 - RNA, 21 nt, RNAi-sense strand
gcugaucgauccugccauguu

SEQ ID NO: 4938 - RNA, 21 nt, RNAi-antisense strand
cauggcaggaucgaucagcuu

SEQ ID NO: 4939 - DNA, 21 bp, Homo sapiens
cagaccgaaatccaggccact

SEQ ID NO: 4940 - RNA, 21 nt, RNAi-sense strand
gaccgaaauccaggccacuuu

SEQ ID NO: 4941 - RNA, 21 nt, RNAi-antisense strand
aguggccuggauuucggucuu

SEQ ID NO: 4942 - DNA, 21 bp, Homo sapiens
caaagtctgtagtgaccagag

SEQ ID NO: 4943 - RNA, 21 nt, RNAi-sense strand
aagucuguagugaccagaguu

SEQ ID NO: 4944 - RNA, 21 nt, RNAi-antisense strand
cucuggucacuacagacuuuu

SEQ ID NO: 4945 - DNA, 21 bp, Homo sapiens
catatctggatacctgccgac

SEQ ID NO: 4946 - RNA, 21 nt, RNAi-sense strand
uaucuggauaccugccgacuu

SEQ ID NO: 4947 - RNA, 21 nt, RNAi-antisense strand
gucggcagguauccagauauu

SEQ ID NO: 4948 - DNA, 21 bp, Homo sapiens
caggacatggatgaggacgat

SEQ ID NO: 4949 - RNA, 21 nt, RNAi-sense strand
ggacauggaugaggacgauuu

SEQ ID NO: 4950 - RNA, 21 nt, RNAi-antisense strand
aucguccucauccauguccuu

SEQ ID NO: 4951 - DNA, 21 bp, Homo sapiens
catggatgaggacgatggcag

SEQ ID NO: 4952 - RNA, 21 nt, RNAi-sense strand
uggaugaggacgauggcaguu

SEQ ID NO: 4953 - RNA, 21 nt, RNAi-antisense strand
cugccaucguccucauccauu

SEQ ID NO: 4954 - DNA, 21 bp, Homo sapiens
cagaagctgctcctggagaca

SEQ ID NO: 4955 - RNA, 21 nt, RNAi-sense strand
gaagcugcuccuggagacauu

SEQ ID NO: 4956 - RNA, 21 nt, RNAi-antisense strand
ugucuccaggagcagcuucuu

SEQ ID NO: 4957 - DNA, 21 bp, Homo sapiens
cagtagacggtacagcgaagg

SEQ ID NO: 4958 - RNA, 21 nt, RNAi-sense strand
guagacgguacagcgaagguu

SEQ ID NO: 4959 - RNA, 21 nt, RNAi-antisense strand
ccuucgcuguaccgucuacuu

SEQ ID NO: 4960 - DNA, 21 bp, Homo sapiens
cagcgaaggcagagagttcag

SEQ ID NO: 4961 - RNA, 21 nt, RNAi-sense strand
gcgaaggcagagaguucaguu

SEQ ID NO: 4962 - RNA, 21 nt, RNAi-antisense strand
cugaacucucugccuucgcuu

SEQ ID NO: 4963 - DNA, 21 bp, Homo sapiens
cagagagttcaggtatggatc

SEQ ID NO: 4964 - RNA, 21 nt, RNAi-sense strand
gagaguucagguauggaucuu

SEQ ID NO: 4965 - RNA, 21 nt, RNAi-antisense strand
gauccauaccugaacucucuu

SEQ ID NO: 4966 - DNA, 21 bp, Homo sapiens
cagccaccagtgccaacgaca

SEQ ID NO: 4967 - RNA, 21 nt, RNAi-sense strand
gccaccagugccaacgacauu

SEQ ID NO: 4968 - RNA, 21 nt, RNAi-antisense strand
ugucguuggcacugguggcuu

SEQ ID NO: 4969 - DNA, 21 bp, Homo sapiens
caccagtgccaacgacagcga

SEQ ID NO: 4970 - RNA, 21 nt, RNAi-sense strand
ccagugccaacgacagcgauu

SEQ ID NO: 4971 - RNA, 21 nt, RNAi-antisense strand
ucgcugucguuggcacugguu

SEQ ID NO: 4972 - DNA, 21 bp, Homo sapiens
cagtgccaacgacagcgagca

SEQ ID NO: 4973 - RNA, 21 nt, RNAi-sense strand
gugccaacgacagcgagcauu

SEQ ID NO: 4974 - RNA, 21 nt, RNAi-antisense strand
ugcucgcugucguuggcacuu

SEQ ID NO: 4975 - DNA, 21 bp, Homo sapiens
caacgacagcgagcagcagag

SEQ ID NO: 4976 - RNA, 21 nt, RNAi-sense strand
acgacagcgagcagcagaguu

SEQ ID NO: 4977 - RNA, 21 nt, RNAi-antisense strand
cucugcugcucgcugucguuu

SEQ ID NO: 4978 - DNA, 21 bp, Homo sapiens
cagcagagcctgtccagcgat

SEQ ID NO: 4979 - RNA, 21 nt, RNAi-sense strand
gcagagccuguccagcgauuu

SEQ ID NO: 4980 - RNA, 21 nt, RNAi-antisense strand
aucgcuggacaggcucugcuu

SEQ ID NO: 4981 - DNA, 21 bp, Homo sapiens
cagagcctgtccagcgatgca

SEQ ID NO: 4982 - RNA, 21 nt, RNAi-sense strand
gagccuguccagcgaugcauu

SEQ ID NO: 4983 - RNA, 21 nt, RNAi-antisense strand
ugcaucgcuggacaggcucuu

SEQ ID NO: 4984 - DNA, 21 bp, Homo sapiens
catacaggatccgtaagcagc

SEQ ID NO: 4985 - RNA, 21 nt, RNAi-sense strand
uacaggauccguaagcagcuu

SEQ ID NO: 4986 - RNA, 21 nt, RNAi-antisense strand
gcugcuuacggauccuguauu

SEQ ID NO: 4987 - DNA, 21 bp, Homo sapiens
caggatccgtaagcagcaccg

SEQ ID NO: 4988 - RNA, 21 nt, RNAi-sense strand
ggauccguaagcagcaccguu

SEQ ID NO: 4989 - RNA, 21 nt, RNAi-antisense strand
cggugcugcuuacggauccuu

SEQ ID NO: 4990 - DNA, 21 bp, Homo sapiens
caggagagcgtgcaggtcaat

SEQ ID NO: 4991 - RNA, 21 nt, RNAi-sense strand
ggagagcgugcaggucaauuu

SEQ ID NO: 4992 - RNA, 21 nt, RNAi-antisense strand
auugaccugcacgcucuccuu

SEQ ID NO: 4993 - DNA, 21 bp, Homo sapiens
cagaagttcgcggaggagctc

SEQ ID NO: 4994 - RNA, 21 nt, RNAi-sense strand
gaaguucgcggaggagcucuu

SEQ ID NO: 4995 - RNA, 21 nt, RNAi-antisense strand
gagcuccuccgcgaacuucuu

SEQ ID NO: 4996 - DNA, 21 bp, Homo sapiens
catggaggaggaaggtgagga

SEQ ID NO: 4997 - RNA, 21 nt, RNAi-sense strand
uggaggaggaaggugaggauu

SEQ ID NO: 4998 - RNA, 21 nt, RNAi-antisense strand
uccucaccuuccuccuccauu

SEQ ID NO: 4999 - DNA, 21 bp, Homo sapiens
catcctggacgagcacgtaca

SEQ ID NO: 5000 - RNA, 21 nt, RNAi-sense strand
uccuggacgagcacguacauu

SEQ ID NO: 5001 - RNA, 21 nt, RNAi-antisense strand
uguacgugcucguccaggauu

SEQ ID NO: 5002 - DNA, 21 bp, Homo sapiens
cacgtacagcgtgtgctgagg

SEQ ID NO: 5003 - RNA, 21 nt, RNAi-sense strand
cguacagcgugugcugagguu

SEQ ID NO: 5004 - RNA, 21 nt, RNAi-antisense strand
ccucagcacacgcuguacguu

SEQ ID NO: 5005 - DNA, 21 bp, Homo sapiens
cagcgtgtgctgaggacacct

SEQ ID NO: 5006 - RNA, 21 nt, RNAi-sense strand
gcgugugcugaggacaccuuu

SEQ ID NO: 5007 - RNA, 21 nt, RNAi-antisense strand
agguguccucagcacacgcuu

SEQ ID NO: 5008 - DNA, 21 bp, Homo sapiens
cacgtggccaagatgccagtg

SEQ ID NO: 5009 - RNA, 21 nt, RNAi-sense strand
cguggccaagaugccaguguu

SEQ ID NO: 5010 - RNA, 21 nt, RNAi-antisense strand
cacuggcaucuuggccacguu

SEQ ID NO: 5011 - DNA, 21 bp, Homo sapiens
caccacgtccaccacagcaca

SEQ ID NO: 5012 - RNA, 21 nt, RNAi-sense strand
ccacguccaccacagcacauu

SEQ ID NO: 5013 - RNA, 21 nt, RNAi-antisense strand
ugugcugugguggacgugguu

SEQ ID NO: 5014 - DNA, 21 bp, Homo sapiens
caagcagaggacaagatcgca

SEQ ID NO: 5015 - RNA, 21 nt, RNAi-sense strand
agcagaggacaagaucgcauu

SEQ ID NO: 5016 - RNA, 21 nt, RNAi-antisense strand
ugcgaucuuguccucugcuuu

SEQ ID NO: 5017 - DNA, 21 bp, Homo sapiens
cagaggacaagatcgcagagg

SEQ ID NO: 5018 - RNA, 21 nt, RNAi-sense strand
gaggacaagaucgcagagguu

SEQ ID NO: 5019 - RNA, 21 nt, RNAi-antisense strand
ccucugcgaucuuguccucuu

SEQ ID NO: 5020 - DNA, 21 bp, Homo sapiens
caagatcgcagaggaaggtgg

SEQ ID NO: 5021 - RNA, 21 nt, RNAi-sense strand
agaucgcagaggaaggugguu

SEQ ID NO: 5022 - RNA, 21 nt, RNAi-antisense strand
ccaccuuccucugcgaucuuu

SEQ ID NO: 5023 - DNA, 21 bp, Homo sapiens
cagccgtgtgacagcatcgtt

SEQ ID NO: 5024 - RNA, 21 nt, RNAi-sense strand
gccgugugacagcaucguuuu

SEQ ID NO: 5025 - RNA, 21 nt, RNAi-antisense strand
aacgaugcugucacacggcuu

SEQ ID NO: 5026 - DNA, 21 bp, Homo sapiens
cagcatcgttgtggcgtacta

SEQ ID NO: 5027 - RNA, 21 nt, RNAi-sense strand
gcaucguuguggcguacuauu

SEQ ID NO: 5028 - RNA, 21 nt, RNAi-antisense strand
uaguacgccacaacgaugcuu

SEQ ID NO: 5029 - DNA, 21 bp, Homo sapiens
catcgttgtggcgtactactt

SEQ ID NO: 5030 - RNA, 21 nt, RNAi-sense strand
ucguuguggcguacuacuuuu

SEQ ID NO: 5031 - RNA, 21 nt, RNAi-antisense strand
aaguaguacgccacaacgauu

SEQ ID NO: 5032 - DNA, 21 bp, Homo sapiens
cagttcaaggagctgctgacc

SEQ ID NO: 5033 - RNA, 21 nt, RNAi-sense strand
guucaaggagcugcugaccuu

SEQ ID NO: 5034 - RNA, 21 nt, RNAi-antisense strand
ggucagcagcuccuugaacuu

SEQ ID NO: 5035 - DNA, 21 bp, Homo sapiens
cagctacagatactacttcaa

SEQ ID NO: 5036 - RNA, 21 nt, RNAi-sense strand
gcuacagauacuacuucaauu

SEQ ID NO: 5037 - RNA, 21 nt, RNAi-antisense strand
uugaaguaguaucuguagcuu

SEQ ID NO: 5038 - DNA, 21 bp, Homo sapiens
cagatactacttcaagaaagt

SEQ ID NO: 5039 - RNA, 21 nt, RNAi-sense strand
gauacuacuucaagaaaguuu

SEQ ID NO: 5040 - RNA, 21 nt, RNAi-antisense strand
acuuucuugaaguaguaucuu

SEQ ID NO: 5041 - DNA, 21 bp, Homo sapiens
caagaaagtgagcgacgagtt

SEQ ID NO: 5042 - RNA, 21 nt, RNAi-sense strand
agaaagugagcgacgaguuuu

SEQ ID NO: 5043 - RNA, 21 nt, RNAi-antisense strand
aacucgucgcucacuuucuuu

SEQ ID NO: 5044 - DNA, 21 bp, Homo sapiens
catcggcaaagtggagaaggt

SEQ ID NO: 5045 - RNA, 21 nt, RNAi-sense strand
ucggcaaaguggagaagguuu

SEQ ID NO: 5046 - RNA, 21 nt, RNAi-antisense strand
accuucuccacuuugccgauu

SEQ ID NO: 5047 - DNA, 21 bp, Homo sapiens
caaagtggagaaggtggactg

SEQ ID NO: 5048 - RNA, 21 nt, RNAi-sense strand
aaguggagaagguggacuguu

SEQ ID NO: 5049 - RNA, 21 nt, RNAi-antisense strand
caguccaccuucuccacuuuu

SEQ ID NO: 5050 - DNA, 21 bp, Homo sapiens
caggcagatgacctcgtactc

SEQ ID NO: 5051 - RNA, 21 nt, RNAi-sense strand
ggcagaugaccucguacucuu

SEQ ID NO: 5052 - RNA, 21 nt, RNAi-antisense strand
gaguacgaggucaucugccuu

SEQ ID NO: 5053 - DNA, 21 bp, Homo sapiens
cagatgacctcgtactcagga

SEQ ID NO: 5054 - RNA, 21 nt, RNAi-sense strand
gaugaccucguacucaggauu

SEQ ID NO: 5055 - RNA, 21 nt, RNAi-antisense strand
uccugaguacgaggucaucuu

SEQ ID NO: 5056 - DNA, 21 bp, Homo sapiens
caagtggtccacaagcttctg

SEQ ID NO: 5057 - RNA, 21 nt, RNAi-sense strand
agugguccacaagcuucuguu

SEQ ID NO: 5058 - RNA, 21 nt, RNAi-antisense strand
cagaagcuuguggaccacuuu

SEQ ID NO: 5059 - DNA, 21 bp, Homo sapiens
cagcctggaccactcctcata

SEQ ID NO: 5060 - RNA, 21 nt, RNAi-sense strand
gccuggaccacuccucauauu

SEQ ID NO: 5061 - RNA, 21 nt, RNAi-antisense strand
uaugaggagugguccaggcuu

SEQ ID NO: 5062 - DNA, 21 bp, Homo sapiens
cactcctcatagcaatacttg

SEQ ID NO: 5063 - RNA, 21 nt, RNAi-sense strand
cuccucauagcaauacuuguu

SEQ ID NO: 5064 - RNA, 21 nt, RNAi-antisense strand
caaguauugcuaugaggaguu

SEQ ID NO: 5065 - DNA, 21 bp, Homo sapiens
caattgtacgcgccaccgagt

SEQ ID NO: 5066 - RNA, 21 nt, RNAi-sense strand
auuguacgcgccaccgaguuu

SEQ ID NO: 5067 - RNA, 21 nt, RNAi-antisense strand
acucgguggcgcguacaauuu

SEQ ID NO: 5068 - DNA, 21 bp, Homo sapiens
caccgagtgccttcaacacag

SEQ ID NO: 5069 - RNA, 21 nt, RNAi-sense strand
ccgagugccuucaacacaguu

SEQ ID NO: 5070 - RNA, 21 nt, RNAi-antisense strand
cuguguugaaggcacucgguu

SEQ ID NO: 5071 - DNA, 21 bp, Homo sapiens
caacacagcttgtctcttgcc

SEQ ID NO: 5072 - RNA, 21 nt, RNAi-sense strand
acacagcuugucucuugccuu

SEQ ID NO: 5073 - RNA, 21 nt, RNAi-antisense strand
ggcaagagacaagcuguguuu

SEQ ID NO: 5074 - DNA, 21 bp, Homo sapiens
cacagcttgtctcttgcctgc

SEQ ID NO: 5075 - RNA, 21 nt, RNAi-sense strand
cagcuugucucuugccugcuu

SEQ ID NO: 5076 - RNA, 21 nt, RNAi-antisense strand
gcaggcaagagacaagcuguu

SEQ ID NO: 5077 - DNA, 21 bp, Homo sapiens
cagcttgtctcttgcctgcca

SEQ ID NO: 5078 - RNA, 21 nt, RNAi-sense strand
gcuugucucuugccugccauu

SEQ ID NO: 5079 - RNA, 21 nt, RNAi-antisense strand
uggcaggcaagagacaagcuu

SEQ ID NO: 5080 - DNA, 21 bp, Homo sapiens
cactgtgtgaatcggcgacgg

SEQ ID NO: 5081 - RNA, 21 nt, RNAi-sense strand
cugugugaaucggcgacgguu

SEQ ID NO: 5082 - RNA, 21 nt, RNAi-antisense strand
ccgucgccgauucacacaguu

SEQ ID NO: 5083 - DNA, 21 bp, Homo sapiens
catttctcaggctaggccagc

SEQ ID NO: 5084 - RNA, 21 nt, RNAi-sense strand
uuucucaggcuaggccagcuu

SEQ ID NO: 5085 - RNA, 21 nt, RNAi-antisense strand
gcuggccuagccugagaaauu

SEQ ID NO: 5086 - DNA, 21 bp, Homo sapiens
catgcgatgacacttgtacaa

SEQ ID NO: 5087 - RNA, 21 nt, RNAi-sense strand
ugcgaugacacuuguacaauu

SEQ ID NO: 5088 - RNA, 21 nt, RNAi-antisense strand
uuguacaagugucaucgcauu

SEQ ID NO: 5089 - DNA, 21 bp, Homo sapiens
gacagattgattcactttgga

SEQ ID NO: 5090 - RNA, 21 nt, RNAi-sense strand
cagauugauucacuuuggauu

SEQ ID NO: 5091 - RNA, 21 nt, RNAi-antisense strand
uccaaagugaaucaaucuguu

SEQ ID NO: 5092 - DNA, 21 bp, Homo sapiens
gattgattcactttggagctg

SEQ ID NO: 5093 - RNA, 21 nt, RNAi-sense strand
uugauucacuuuggagcuguu

SEQ ID NO: 5094 - RNA, 21 nt, RNAi-antisense strand
cagcuccaaagugaaucaauu

SEQ ID NO: 5095 - DNA, 21 bp, Homo sapiens
gattcactttggagctgtaag

SEQ ID NO: 5096 - RNA, 21 nt, RNAi-sense strand
uucacuuuggagcuguaaguu

SEQ ID NO: 5097 - RNA, 21 nt, RNAi-antisense strand
cuuacagcuccaaagugaauu

SEQ ID NO: 5098 - DNA, 21 bp, Homo sapiens
gagctgtaagtactgatgtat

SEQ ID NO: 5099 - RNA, 21 nt, RNAi-sense strand
gcuguaaguacugauguauuu

SEQ ID NO: 5100 - RNA, 21 nt, RNAi-antisense strand
auacaucaguacuuacagcuu

SEQ ID NO: 5101 - DNA, 21 bp, Homo sapiens
gacctcggagcaagtttcacc

SEQ ID NO: 5102 - RNA, 21 nt, RNAi-sense strand
ccucggagcaaguuucaccuu

SEQ ID NO: 5103 - RNA, 21 nt, RNAi-antisense strand
ggugaaacuugcuccgagguu

SEQ ID NO: 5104 - DNA, 21 bp, Homo sapiens
gagcaagtttcaccgaagatg

SEQ ID NO: 5105 - RNA, 21 nt, RNAi-sense strand
gcaaguuucaccgaagauguu

SEQ ID NO: 5106 - RNA, 21 nt, RNAi-antisense strand
caucuucggugaaacuugcuu

SEQ ID NO: 5107 - DNA, 21 bp, Homo sapiens
gagaactggtgtccacagacc

SEQ ID NO: 5108 - RNA, 21 nt, RNAi-sense strand
gaacugguguccacagaccuu

SEQ ID NO: 5109 - RNA, 21 nt, RNAi-antisense strand
ggucuguggacaccaguucuu

SEQ ID NO: 5110 - DNA, 21 bp, Homo sapiens
gaaaggtgttggcattaaagg

SEQ ID NO: 5111 - RNA, 21 nt, RNAi-sense strand
aagguguuggcauuaaagguu

SEQ ID NO: 5112 - RNA, 21 nt, RNAi-antisense strand
ccuuuaaugccaacaccuuuu

SEQ ID NO: 5113 - DNA, 21 bp, Homo sapiens
gataagcctgttcaggacttt

SEQ ID NO: 5114 - RNA, 21 nt, RNAi-sense strand
uaagccuguucaggacuuuuu

SEQ ID NO: 5115 - RNA, 21 nt, RNAi-antisense strand
aaaguccugaacaggcuuauu

SEQ ID NO: 5116 - DNA, 21 bp, Homo sapiens
gacttgctggacttctggttt

SEQ ID NO: 5117 - RNA, 21 nt, RNAi-sense strand
cuugcuggacuucugguuuuu

SEQ ID NO: 5118 - RNA, 21 nt, RNAi-antisense strand
aaaccagaaguccagcaaguu

SEQ ID NO: 5119 - DNA, 21 bp, Homo sapiens
gacttctggtttgcctgcact

SEQ ID NO: 5120 - RNA, 21 nt, RNAi-sense strand
cuucugguuugccugcacuuu

SEQ ID NO: 5121 - RNA, 21 nt, RNAi-antisense strand
agugcaggcaaaccagaaguu

SEQ ID NO: 5122 - DNA, 21 bp, Homo sapiens
gactcgaacgaggagaagagg

SEQ ID NO: 5123 - RNA, 21 nt, RNAi-sense strand
cucgaacgaggagaagagguu

SEQ ID NO: 5124 - RNA, 21 nt, RNAi-antisense strand
ccucuucuccucguucgaguu

SEQ ID NO: 5125 - DNA, 21 bp, Homo sapiens
gaacgaggagaagaggctgaa

SEQ ID NO: 5126 - RNA, 21 nt, RNAi-sense strand
acgaggagaagaggcugaauu

SEQ ID NO: 5127 - RNA, 21 nt, RNAi-antisense strand
uucagccucuucuccucguuu

SEQ ID NO: 5128 - DNA, 21 bp, Homo sapiens
gaggagaagaggctgaagctg

SEQ ID NO: 5129 - RNA, 21 nt, RNAi-sense strand
ggagaagaggcugaagcuguu

SEQ ID NO: 5130 - RNA, 21 nt, RNAi-antisense strand
cagcuucagccucuucuccuu

SEQ ID NO: 5131 - DNA, 21 bp, Homo sapiens
gagaagaggctgaagctggcg

SEQ ID NO: 5132 - RNA, 21 nt, RNAi-sense strand
gaagaggcugaagcuggcguu

SEQ ID NO: 5133 - RNA, 21 nt, RNAi-antisense strand
cgccagcuucagccucuucuu

SEQ ID NO: 5134 - DNA, 21 bp, Homo sapiens
gaagaggctgaagctggcgag

SEQ ID NO: 5135 - RNA, 21 nt, RNAi-sense strand
agaggcugaagcuggcgaguu

SEQ ID NO: 5136 - RNA, 21 nt, RNAi-antisense strand
cucgccagcuucagccucuuu

SEQ ID NO: 5137 - DNA, 21 bp, Homo sapiens
gaagctggcgagagccatcta

SEQ ID NO: 5138 - RNA, 21 nt, RNAi-sense strand
agcuggcgagagccaucuauu

SEQ ID NO: 5139 - RNA, 21 nt, RNAi-antisense strand
uagauggcucucgccagcuuu

SEQ ID NO: 5140 - DNA, 21 bp, Homo sapiens
gagagccatctaccgaaagta

SEQ ID NO: 5141 - RNA, 21 nt, RNAi-sense strand
gagccaucuaccgaaaguauu

SEQ ID NO: 5142 - RNA, 21 nt, RNAi-antisense strand
uacuuucgguagauggcucuu

SEQ ID NO: 5143 - DNA, 21 bp, Homo sapiens
gagccatctaccgaaagtaca

SEQ ID NO: 5144 - RNA, 21 nt, RNAi-sense strand
gccaucuaccgaaaguacauu

SEQ ID NO: 5145 - RNA, 21 nt, RNAi-antisense strand
uguacuuucgguagauggcuu

SEQ ID NO: 5146 - DNA, 21 bp, Homo sapiens
gataacaatggcatcgtgtcc

SEQ ID NO: 5147 - RNA, 21 nt, RNAi-sense strand
uaacaauggcaucguguccuu

SEQ ID NO: 5148 - RNA, 21 nt, RNAi-antisense strand
ggacacgaugccauuguuauu

SEQ ID NO: 5149 - DNA, 21 bp, Homo sapiens
gaccaagccagccaccaagag

SEQ ID NO: 5150 - RNA, 21 nt, RNAi-sense strand
ccaagccagccaccaagaguu

SEQ ID NO: 5151 - RNA, 21 nt, RNAi-antisense strand
cucuugguggcuggcuugguu

SEQ ID NO: 5152 - DNA, 21 bp, Homo sapiens
gaagcagctgatcgatcctgc

SEQ ID NO: 5153 - RNA, 21 nt, RNAi-sense strand
agcagcugaucgauccugcuu

SEQ ID NO: 5154 - RNA, 21 nt, RNAi-antisense strand
gcaggaucgaucagcugcuuu

SEQ ID NO: 5155 - DNA, 21 bp, Homo sapiens
gatcgatcctgccatgtttga

SEQ ID NO: 5156 - RNA, 21 nt, RNAi-sense strand
ucgauccugccauguuugauu

SEQ ID NO: 5157 - RNA, 21 nt, RNAi-antisense strand
ucaaacauggcaggaucgauu

SEQ ID NO: 5158 - DNA, 21 bp, Homo sapiens
gatcctgccatgtttgaccag

SEQ ID NO: 5159 - RNA, 21 nt, RNAi-sense strand
uccugccauguuugaccaguu

SEQ ID NO: 5160 - RNA, 21 nt, RNAi-antisense strand
cuggucaaacauggcaggauu

SEQ ID NO: 5161 - DNA, 21 bp, Homo sapiens
gaccgaaatccaggccactat

SEQ ID NO: 5162 - RNA, 21 nt, RNAi-sense strand
ccgaaauccaggccacuauuu

SEQ ID NO: 5163 - RNA, 21 nt, RNAi-antisense strand
auaguggccuggauuucgguu

SEQ ID NO: 5164 - DNA, 21 bp, Homo sapiens
gaaatccaggccactatggag

SEQ ID NO: 5165 - RNA, 21 nt, RNAi-sense strand
aauccaggccacuauggaguu

SEQ ID NO: 5166 - RNA, 21 nt, RNAi-antisense strand
cuccauaguggccuggauuuu

SEQ ID NO: 5167 - DNA, 21 bp, Homo sapiens
gaatatacgaggacaggctcg

SEQ ID NO: 5168 - RNA, 21 nt, RNAi-sense strand
auauacgaggacaggcucguu

SEQ ID NO: 5169 - RNA, 21 nt, RNAi-antisense strand
cgagccuguccucguauauuu

SEQ ID NO: 5170 - DNA, 21 bp, Homo sapiens
gatacctgccgaccttaaatg

SEQ ID NO: 5171 - RNA, 21 nt, RNAi-sense strand
uaccugccgaccuuaaauguu

SEQ ID NO: 5172 - RNA, 21 nt, RNAi-antisense strand
cauuuaaggucggcagguauu

SEQ ID NO: 5173 - DNA, 21 bp, Homo sapiens
gaccttaaatgaagatgagga

SEQ ID NO: 5174 - RNA, 21 nt, RNAi-sense strand
ccuuaaaugaagaugaggauu

SEQ ID NO: 5175 - RNA, 21 nt, RNAi-antisense strand
uccucaucuucauuuaagguu

SEQ ID NO: 5176 - DNA, 21 bp, Homo sapiens
gaagatgaggaatggaagtgt

SEQ ID NO: 5177 - RNA, 21 nt, RNAi-sense strand
agaugaggaauggaaguguuu

SEQ ID NO: 5178 - RNA, 21 nt, RNAi-antisense strand
acacuuccauuccucaucuuu

SEQ ID NO: 5179 - DNA, 21 bp, Homo sapiens
gatgaggaatggaagtgtgac

SEQ ID NO: 5180 - RNA, 21 nt, RNAi-sense strand
ugaggaauggaagugugacuu

SEQ ID NO: 5181 - RNA, 21 nt, RNAi-antisense strand
gucacacuuccauuccucauu

SEQ ID NO: 5182 - DNA, 21 bp, Homo sapiens
gaggaatggaagtgtgaccag

SEQ ID NO: 5183 - RNA, 21 nt, RNAi-sense strand
ggaauggaagugugaccaguu

SEQ ID NO: 5184 - RNA, 21 nt, RNAi-antisense strand
cuggucacacuuccauuccuu

SEQ ID NO: 5185 - DNA, 21 bp, Homo sapiens
gaatggaagtgtgaccaggac

SEQ ID NO: 5186 - RNA, 21 nt, RNAi-sense strand
auggaagugugaccaggacuu

SEQ ID NO: 5187 - RNA, 21 nt, RNAi-antisense strand
guccuggucacacuuccauuu

SEQ ID NO: 5188 - DNA, 21 bp, Homo sapiens
gaagtgtgaccaggacatgga

SEQ ID NO: 5189 - RNA, 21 nt, RNAi-sense strand
agugugaccaggacauggauu

SEQ ID NO: 5190 - RNA, 21 nt, RNAi-antisense strand
uccauguccuggucacacuuu

SEQ ID NO: 5191 - DNA, 21 bp, Homo sapiens
gaccaggacatggatgaggac

SEQ ID NO: 5192 - RNA, 21 nt, RNAi-sense strand
ccaggacauggaugaggacuu

SEQ ID NO: 5193 - RNA, 21 nt, RNAi-antisense strand
guccucauccauguccugguu

SEQ ID NO: 5194 - DNA, 21 bp, Homo sapiens
gacatggatgaggacgatggc

SEQ ID NO: 5195 - RNA, 21 nt, RNAi-sense strand
cauggaugaggacgauggcuu

SEQ ID NO: 5196 - RNA, 21 nt, RNAi-antisense strand
gccaucguccucauccauguu

SEQ ID NO: 5197 - DNA, 21 bp, Homo sapiens
gatgaggacgatggcagagac

SEQ ID NO: 5198 - RNA, 21 nt, RNAi-sense strand
ugaggacgauggcagagacuu

SEQ ID NO: 5199 - RNA, 21 nt, RNAi-antisense strand
gucucugccaucguccucauu

SEQ ID NO: 5200 - DNA, 21 bp, Homo sapiens
gaggacgatggcagagacgct

SEQ ID NO: 5201 - RNA, 21 nt, RNAi-sense strand
ggacgauggcagagacgcuuu

SEQ ID NO: 5202 - RNA, 21 nt, RNAi-antisense strand
agcgucucugccaucguccuu

SEQ ID NO: 5203 - DNA, 21 bp, Homo sapiens
gacgatggcagagacgctgct

SEQ ID NO: 5204 - RNA, 21 nt, RNAi-sense strand
cgauggcagagacgcugcuuu

SEQ ID NO: 5205 - RNA, 21 nt, RNAi-antisense strand
agcagcgucucugccaucguu

SEQ ID NO: 5206 - DNA, 21 bp, Homo sapiens
gaagctgctcctggagacagc

SEQ ID NO: 5207 - RNA, 21 nt, RNAi-sense strand
agcugcuccuggagacagcuu

SEQ ID NO: 5208 - RNA, 21 nt, RNAi-antisense strand
gcugucuccaggagcagcuuu

SEQ ID NO: 5209 - DNA, 21 bp, Homo sapiens
gacggtacagcgaaggcagag

SEQ ID NO: 5210 - RNA, 21 nt, RNAi-sense strand
cgguacagcgaaggcagaguu

SEQ ID NO: 5211 - RNA, 21 nt, RNAi-antisense strand
cucugccuucgcuguaccguu

SEQ ID NO: 5212 - DNA, 21 bp, Homo sapiens
gaaggcagagagttcaggtat

SEQ ID NO: 5213 - RNA, 21 nt, RNAi-sense strand
aggcagagaguucagguauuu

SEQ ID NO: 5214 - RNA, 21 nt, RNAi-antisense strand
auaccugaacucucugccuuu

SEQ ID NO: 5215 - DNA, 21 bp, Homo sapiens
gagagttcaggtatggatcct

SEQ ID NO: 5216 - RNA, 21 nt, RNAi-sense strand
gaguucagguauggauccuuu

SEQ ID NO: 5217 - RNA, 21 nt, RNAi-antisense strand
aggauccauaccugaacucuu

SEQ ID NO: 5218 - DNA, 21 bp, Homo sapiens
gagttcaggtatggatcctgg

SEQ ID NO: 5219 - RNA, 21 nt, RNAi-sense strand
guucagguauggauccugguu

SEQ ID NO: 5220 - RNA, 21 nt, RNAi-antisense strand
ccaggauccauaccugaacuu

SEQ ID NO: 5221 - DNA, 21 bp, Homo sapiens
gagcctgtccagcgatgcaga

SEQ ID NO: 5222 - RNA, 21 nt, RNAi-sense strand
gccuguccagcgaugcagauu

SEQ ID NO: 5223 - RNA, 21 nt, RNAi-antisense strand
ucugcaucgcuggacaggcuu

SEQ ID NO: 5224 - DNA, 21 bp, Homo sapiens
gatccgtaagcagcaccgcag

SEQ ID NO: 5225 - RNA, 21 nt, RNAi-sense strand
uccguaagcagcaccgcaguu

SEQ ID NO: 5226 - RNA, 21 nt, RNAi-antisense strand
cugcggugcugcuuacggauu

SEQ ID NO: 5227 - DNA, 21 bp, Homo sapiens
gagatgcaggagagcgtgcag

SEQ ID NO: 5228 - RNA, 21 nt, RNAi-sense strand
gaugcaggagagcgugcaguu

SEQ ID NO: 5229 - RNA, 21 nt, RNAi-antisense strand
cugcacgcucuccugcaucuu

SEQ ID NO: 5230 - DNA, 21 bp, Homo sapiens
gatgcaggagagcgtgcaggt

SEQ ID NO: 5231 - RNA, 21 nt, RNAi-sense strand
ugcaggagagcgugcagguuu

SEQ ID NO: 5232 - RNA, 21 nt, RNAi-antisense strand
accugcacgcucuccugcauu

SEQ ID NO: 5233 - DNA, 21 bp, Homo sapiens
gagcctcagaagttcgcggag

SEQ ID NO: 5234 - RNA, 21 nt, RNAi-sense strand
gccucagaaguucgcggaguu

SEQ ID NO: 5235 - RNA, 21 nt, RNAi-antisense strand
cuccgcgaacuucugaggcuu

SEQ ID NO: 5236 - DNA, 21 bp, Homo sapiens
gaagttcgcggaggagctcat

SEQ ID NO: 5237 - RNA, 21 nt, RNAi-sense strand
aguucgcggaggagcucauuu

SEQ ID NO: 5238 - RNA, 21 nt, RNAi-antisense strand
augagcuccuccgcgaacuuu

SEQ ID NO: 5239 - DNA, 21 bp, Homo sapiens
gaagctggaggagcggctgaa

SEQ ID NO: 5240 - RNA, 21 nt, RNAi-sense strand
agcuggaggagcggcugaauu

SEQ ID NO: 5241 - RNA, 21 nt, RNAi-antisense strand
uucagccgcuccuccagcuuu

SEQ ID NO: 5242 - DNA, 21 bp, Homo sapiens
gaggaaggtgaggacggcgat

SEQ ID NO: 5243 - RNA, 21 nt, RNAi-sense strand
ggaaggugaggacggcgauuu

SEQ ID NO: 5244 - RNA, 21 nt, RNAi-antisense strand
aucgccguccucaccuuccuu

SEQ ID NO: 5245 - DNA, 21 bp, Homo sapiens
gaaggtgaggacggcgatcca

SEQ ID NO: 5246 - RNA, 21 nt, RNAi-sense strand
aggugaggacggcgauccauu

SEQ ID NO: 5247 - RNA, 21 nt, RNAi-antisense strand
uggaucgccguccucaccuuu

SEQ ID NO: 5248 - DNA, 21 bp, Homo sapiens
gaggacggcgatccatcgtca

SEQ ID NO: 5249 - RNA, 21 nt, RNAi-sense strand
ggacggcgauccaucgucauu

SEQ ID NO: 5250 - RNA, 21 nt, RNAi-antisense strand
ugacgauggaucgccguccuu

SEQ ID NO: 5251 - DNA, 21 bp, Homo sapiens
gagagcatcctggacgagcac

SEQ ID NO: 5252 - RNA, 21 nt, RNAi-sense strand
gagcauccuggacgagcacuu

SEQ ID NO: 5253 - RNA, 21 nt, RNAi-antisense strand
gugcucguccaggaugcucuu

SEQ ID NO: 5254 - DNA, 21 bp, Homo sapiens
gagcatcctggacgagcacgt

SEQ ID NO: 5255 - RNA, 21 nt, RNAi-sense strand
gcauccuggacgagcacguuu

SEQ ID NO: 5256 - RNA, 21 nt, RNAi-antisense strand
acgugcucguccaggaugcuu

SEQ ID NO: 5257 - DNA, 21 bp, Homo sapiens
gacgagcacgtacagcgtgtg

SEQ ID NO: 5258 - RNA, 21 nt, RNAi-sense strand
cgagcacguacagcguguguu

SEQ ID NO: 5259 - RNA, 21 nt, RNAi-antisense strand
cacacgcuguacgugcucguu

SEQ ID NO: 5260 - DNA, 21 bp, Homo sapiens
gagcacgtacagcgtgtgctg

SEQ ID NO: 5261 - RNA, 21 nt, RNAi-sense strand
gcacguacagcgugugcuguu

SEQ ID NO: 5262 - RNA, 21 nt, RNAi-antisense strand
cagcacacgcuguacgugcuu

SEQ ID NO: 5263 - DNA, 21 bp, Homo sapiens
gaggctactcagagagtgttg

SEQ ID NO: 5264 - RNA, 21 nt, RNAi-sense strand
ggcuacucagagaguguuguu

SEQ ID NO: 5265 - RNA, 21 nt, RNAi-antisense strand
caacacucucugaguagccuu

SEQ ID NO: 5266 - DNA, 21 bp, Homo sapiens
gaaatgccaagaaggctgagt

SEQ ID NO: 5267 - RNA, 21 nt, RNAi-sense strand
aaugccaagaaggcugaguuu

SEQ ID NO: 5268 - RNA, 21 nt, RNAi-antisense strand
acucagccuucuuggcauuuu

SEQ ID NO: 5269 - DNA, 21 bp, Homo sapiens
gaggatgcggagaagaaccag

SEQ ID NO: 5270 - RNA, 21 nt, RNAi-sense strand
ggaugcggagaagaaccaguu

SEQ ID NO: 5271 - RNA, 21 nt, RNAi-antisense strand
cugguucuucuccgcauccuu

SEQ ID NO: 5272 - DNA, 21 bp, Homo sapiens
gatgcggagaagaaccagaaa

SEQ ID NO: 5273 - RNA, 21 nt, RNAi-sense strand
ugcggagaagaaccagaaauu

SEQ ID NO: 5274 - RNA, 21 nt, RNAi-antisense strand
uuucugguucuucuccgcauu

SEQ ID NO: 5275 - DNA, 21 bp, Homo sapiens
gacgtctggaggaggaagaaa

SEQ ID NO: 5276 - RNA, 21 nt, RNAi-sense strand
cgucuggaggaggaagaaauu

SEQ ID NO: 5277 - RNA, 21 nt, RNAi-antisense strand
uuucuuccuccuccagacguu

SEQ ID NO: 5278 - DNA, 21 bp, Homo sapiens
gaggacaagatcgcagaggaa

SEQ ID NO: 5279 - RNA, 21 nt, RNAi-sense strand
ggacaagaucgcagaggaauu

SEQ ID NO: 5280 - RNA, 21 nt, RNAi-antisense strand
uuccucugcgaucuuguccuu

SEQ ID NO: 5281 - DNA, 21 bp, Homo sapiens
gacaagatcgcagaggaaggt

SEQ ID NO: 5282 - RNA, 21 nt, RNAi-sense strand
caagaucgcagaggaagguuu

SEQ ID NO: 5283 - RNA, 21 nt, RNAi-antisense strand
accuuccucugcgaucuuguu

SEQ ID NO: 5284 - DNA, 21 bp, Homo sapiens
gacagcatcgttgtggcgtac

SEQ ID NO: 5285 - RNA, 21 nt, RNAi-sense strand
cagcaucguuguggcguacuu

SEQ ID NO: 5286 - RNA, 21 nt, RNAi-antisense strand
guacgccacaacgaugcuguu

SEQ ID NO: 5287 - DNA, 21 bp, Homo sapiens
gatactacttcaagaaagtga

SEQ ID NO: 5288 - RNA, 21 nt, RNAi-sense strand
uacuacuucaagaaagugauu

SEQ ID NO: 5289 - RNA, 21 nt, RNAi-antisense strand
ucacuuucuugaaguaguauu

SEQ ID NO: 5290 - DNA, 21 bp, Homo sapiens
gaaagtgagcgacgagtttga

SEQ ID NO: 5291 - RNA, 21 nt, RNAi-sense strand
aagugagcgacgaguuugauu

SEQ ID NO: 5292 - RNA, 21 nt, RNAi-antisense strand
ucaaacucgucgcucacuuuu

SEQ ID NO: 5293 - DNA, 21 bp, Homo sapiens
gagcgacgagtttgactgtgg

SEQ ID NO: 5294 - RNA, 21 nt, RNAi-sense strand
gcgacgaguuugacugugguu

SEQ ID NO: 5295 - RNA, 21 nt, RNAi-antisense strand
ccacagucaaacucgucgcuu

SEQ ID NO: 5296 - DNA, 21 bp, Homo sapiens
gaggaggttcgagaggacgag

SEQ ID NO: 5297 - RNA, 21 nt, RNAi-sense strand
ggagguucgagaggacgaguu

SEQ ID NO: 5298 - RNA, 21 nt, RNAi-antisense strand
cucguccucucgaaccuccuu

SEQ ID NO: 5299 - DNA, 21 bp, Homo sapiens
gaggagaagatcatcggcaaa

SEQ ID NO: 5300 - RNA, 21 nt, RNAi-sense strand
ggagaagaucaucggcaaauu

SEQ ID NO: 5301 - RNA, 21 nt, RNAi-antisense strand
uuugccgaugaucuucuccuu

SEQ ID NO: 5302 - DNA, 21 bp, Homo sapiens
gagaagatcatcggcaaagtg

SEQ ID NO: 5303 - RNA, 21 nt, RNAi-sense strand
gaagaucaucggcaaaguguu

SEQ ID NO: 5304 - RNA, 21 nt, RNAi-antisense strand
cacuuugccgaugaucuucuu

SEQ ID NO: 5305 - DNA, 21 bp, Homo sapiens
gaagatcatcggcaaagtgga

SEQ ID NO: 5306 - RNA, 21 nt, RNAi-sense strand
agaucaucggcaaaguggauu

SEQ ID NO: 5307 - RNA, 21 nt, RNAi-antisense strand
uccacuuugccgaugaucuuu

SEQ ID NO: 5308 - DNA, 21 bp, Homo sapiens
gatcatcggcaaagtggagaa

SEQ ID NO: 5309 - RNA, 21 nt, RNAi-sense strand
ucaucggcaaaguggagaauu

SEQ ID NO: 5310 - RNA, 21 nt, RNAi-antisense strand
uucuccacuuugccgaugauu

SEQ ID NO: 5311 - DNA, 21 bp, Homo sapiens
gagaaggtggactgataggct

SEQ ID NO: 5312 - RNA, 21 nt, RNAi-sense strand
gaagguggacugauaggcuuu

SEQ ID NO: 5313 - RNA, 21 nt, RNAi-antisense strand
agccuaucaguccaccuucuu

SEQ ID NO: 5314 - DNA, 21 bp, Homo sapiens
gaaggtggactgataggctgg

SEQ ID NO: 5315 - RNA, 21 nt, RNAi-sense strand
agguggacugauaggcugguu

SEQ ID NO: 5316 - RNA, 21 nt, RNAi-antisense strand
ccagccuaucaguccaccuuu

SEQ ID NO: 5317 - DNA, 21 bp, Homo sapiens
gatgacctcgtactcaggagc

SEQ ID NO: 5318 - RNA, 21 nt, RNAi-sense strand
ugaccucguacucaggagcuu

SEQ ID NO: 5319 - RNA, 21 nt, RNAi-antisense strand
gcuccugaguacgaggucauu

SEQ ID NO: 5320 - DNA, 21 bp, Homo sapiens
gaccactcctcatagcaatac

SEQ ID NO: 5321 - RNA, 21 nt, RNAi-sense strand
ccacuccucauagcaauacuu

SEQ ID NO: 5322 - RNA, 21 nt, RNAi-antisense strand
guauugcuaugaggagugguu

SEQ ID NO: 5323 - DNA, 21 bp, Homo sapiens
gagtgccttcaacacagcttg

SEQ ID NO: 5324 - RNA, 21 nt, RNAi-sense strand
gugccuucaacacagcuuguu

SEQ ID NO: 5325 - RNA, 21 nt, RNAi-antisense strand
caagcuguguugaaggcacuu

SEQ ID NO: 5326 - DNA, 21 bp, Homo sapiens
taaaggtgagacttcgacggc

SEQ ID NO: 5327 - RNA, 21 nt, RNAi-sense strand
aaggugagacuucgacggcuu

SEQ ID NO: 5328 - RNA, 21 nt, RNAi-antisense strand
gccgucgaagucucaccuuuu

SEQ ID NO: 5329 - DNA, 21 bp, Homo sapiens
taagcctgttcaggactttcc

SEQ ID NO: 5330 - RNA, 21 nt, RNAi-sense strand
agccuguucaggacuuuccuu

SEQ ID NO: 5331 - RNA, 21 nt, RNAi-antisense strand
ggaaaguccugaacaggcuuu

SEQ ID NO: 5332 - DNA, 21 bp, Homo sapiens
taccgaaagtacattcttgat

SEQ ID NO: 5333 - RNA, 21 nt, RNAi-sense strand
ccgaaaguacauucuugauuu

SEQ ID NO: 5334 - RNA, 21 nt, RNAi-antisense strand
aucaagaauguacuuucgguu

SEQ ID NO: 5335 - DNA, 21 bp, Homo sapiens
tacattcttgataacaatggc

SEQ ID NO: 5336 - RNA, 21 nt, RNAi-sense strand
cauucuugauaacaauggcuu

SEQ ID NO: 5337 - RNA, 21 nt, RNAi-antisense strand
gccauuguuaucaagaauguu

SEQ ID NO: 5338 - DNA, 21 bp, Homo sapiens
tatttggaatatacgaggaca

SEQ ID NO: 5339 - RNA, 21 nt, RNAi-sense strand
uuuggaauauacgaggacauu

SEQ ID NO: 5340 - RNA, 21 nt, RNAi-antisense strand
uguccucguauauuccaaauu

SEQ ID NO: 5341 - DNA, 21 bp, Homo sapiens
tatacgaggacaggctcggag

SEQ ID NO: 5342 - RNA, 21 nt, RNAi-sense strand
uacgaggacaggcucggaguu

SEQ ID NO: 5343 - RNA, 21 nt, RNAi-antisense strand
cuccgagccuguccucguauu

SEQ ID NO: 5344 - DNA, 21 bp, Homo sapiens
tacgaggacaggctcggagag

SEQ ID NO: 5345 - RNA, 21 nt, RNAi-sense strand
cgaggacaggcucggagaguu

SEQ ID NO: 5346 - RNA, 21 nt, RNAi-antisense strand
cucuccgagccuguccucguu

SEQ ID NO: 5347 - DNA, 21 bp, Homo sapiens
tatctggatacctgccgacct

SEQ ID NO: 5348 - RNA, 21 nt, RNAi-sense strand
ucuggauaccugccgaccuuu

SEQ ID NO: 5349 - RNA, 21 nt, RNAi-antisense strand
aggucggcagguauccagauu

SEQ ID NO: 5350 - DNA, 21 bp, Homo sapiens
tacctgccgaccttaaatgaa

SEQ ID NO: 5351 - RNA, 21 nt, RNAi-sense strand
ccugccgaccuuaaaugaauu

SEQ ID NO: 5352 - RNA, 21 nt, RNAi-antisense strand
uucauuuaaggucggcagguu

SEQ ID NO: 5353 - DNA, 21 bp, Homo sapiens
taaatgaagatgaggaatgga

SEQ ID NO: 5354 - RNA, 21 nt, RNAi-sense strand
aaugaagaugaggaauggauu

SEQ ID NO: 5355 - RNA, 21 nt, RNAi-antisense strand
uccauuccucaucuucauuuu

SEQ ID NO: 5356 - DNA, 21 bp, Homo sapiens
tagacggtacagcgaaggcag

SEQ ID NO: 5357 - RNA, 21 nt, RNAi-sense strand
gacgguacagcgaaggcaguu

SEQ ID NO: 5358 - RNA, 21 nt, RNAi-antisense strand
cugccuucgcuguaccgucuu

SEQ ID NO: 5359 - DNA, 21 bp, Homo sapiens
tacagcgaaggcagagagttc

SEQ ID NO: 5360 - RNA, 21 nt, RNAi-sense strand
cagcgaaggcagagaguucuu

SEQ ID NO: 5361 - RNA, 21 nt, RNAi-antisense strand
gaacucucugccuucgcuguu

SEQ ID NO: 5362 - DNA, 21 bp, Homo sapiens
tattatgtcaatgccggctat

SEQ ID NO: 5363 - RNA, 21 nt, RNAi-sense strand
uuaugucaaugccggcuauuu

SEQ ID NO: 5364 - RNA, 21 nt, RNAi-antisense strand
auagccggcauugacauaauu

SEQ ID NO: 5365 - DNA, 21 bp, Homo sapiens
tatgtcaatgccggctatgcc

SEQ ID NO: 5366 - RNA, 21 nt, RNAi-sense strand
ugucaaugccggcuaugccuu

SEQ ID NO: 5367 - RNA, 21 nt, RNAi-antisense strand
ggcauagccggcauugacauu

SEQ ID NO: 5368 - DNA, 21 bp, Homo sapiens
tacaggatccgtaagcagcac

SEQ ID NO: 5369 - RNA, 21 nt, RNAi-sense strand
caggauccguaagcagcacuu

SEQ ID NO: 5370 - RNA, 21 nt, RNAi-antisense strand
gugcugcuuacggauccuguu

SEQ ID NO: 5371 - DNA, 21 bp, Homo sapiens
tacagcgtgtgctgaggacac

SEQ ID NO: 5372 - RNA, 21 nt, RNAi-sense strand
cagcgugugcugaggacacuu

SEQ ID NO: 5373 - RNA, 21 nt, RNAi-antisense strand
guguccucagcacacgcuguu

SEQ ID NO: 5374 - DNA, 21 bp, Homo sapiens
tactcagagagtgttggcgct

SEQ ID NO: 5375 - RNA, 21 nt, RNAi-sense strand
cucagagaguguuggcgcuuu

SEQ ID NO: 5376 - RNA, 21 nt, RNAi-antisense strand
agcgccaacacucucugaguu

SEQ ID NO: 5377 - DNA, 21 bp, Homo sapiens
tactacttcaagaaagtgagc

SEQ ID NO: 5378 - RNA, 21 nt, RNAi-sense strand
cuacuucaagaaagugagcuu

SEQ ID NO: 5379 - RNA, 21 nt, RNAi-antisense strand
gcucacuuucuugaaguaguu

SEQ ID NO: 5380 - DNA, 21 bp, Homo sapiens
tacttcaagaaagtgagcgac

SEQ ID NO: 5381 - RNA, 21 nt, RNAi-sense strand
cuucaagaaagugagcgacuu

SEQ ID NO: 5382 - RNA, 21 nt, RNAi-antisense strand
gucgcucacuuucuugaaguu

SEQ ID NO: 5383 - DNA, 21 bp, Homo sapiens
tatgtacatttctcaggctag

SEQ ID NO: 5384 - RNA, 21 nt, RNAi-sense strand
uguacauuucucaggcuaguu

SEQ ID NO: 5385 - RNA, 21 nt, RNAi-antisense strand
cuagccugagaaauguacauu

SEQ ID NO: 5386 - DNA, 21 bp, Homo sapiens
tacatttctcaggctaggcca

SEQ ID NO: 5387 - RNA, 21 nt, RNAi-sense strand
cauuucucaggcuaggccauu

SEQ ID NO: 5388 - RNA, 21 nt, RNAi-antisense strand
uggccuagccugagaaauguu

SEQ ID NO: 5389 - DNA, 21 bp, Homo sapiens
aagaaagtgagcgacgagttt

SEQ ID NO: 5390 - RNA, 21 nt, RNAi-sense strand
gaaagugagcgacgaguuuuu

SEQ ID NO: 5391 - RNA, 21 nt, RNAi-antisense strand
aaacucgucgcucacuuucuu

SEQ ID NO: 5392 - DNA, 21 bp, Homo sapiens
cattaaaggtgagacttcgac

SEQ ID NO: 5393 - RNA, 21 nt, RNAi-sense strand
uuaaaggugagacuucgacuu

SEQ ID NO: 5394 - RNA, 21 nt, RNAi-antisense strand
gucgaagucucaccuuuaauu

SEQ ID NO: 5395 - DNA, 21 bp, Homo sapiens
catatctggatacctgccgac

SEQ ID NO: 5396 - RNA, 21 nt, RNAi-sense strand
uaucuggauaccugccgacuu

SEQ ID NO: 5397 - RNA, 21 nt, RNAi-antisense strand
gucggcagguauccagauauu

SEQ ID NO: 5398 - DNA, 21 bp, Homo sapiens
cagcatcgttgtggcgtacta

SEQ ID NO: 5399 - RNA, 21 nt, RNAi-sense strand
gcaucguuguggcguacuauu

SEQ ID NO: 5400 - RNA, 21 nt, RNAi-antisense strand
uaguacgccacaacgaugcuu

SEQ ID NO: 5401 - DNA, 21 bp, Homo sapiens
catcgttgtggcgtactactt

SEQ ID NO: 5402 - RNA, 21 nt, RNAi-sense strand
ucguuguggcguacuacuuuu

SEQ ID NO: 5403 - RNA, 21 nt, RNAi-antisense strand
aaguaguacgccacaacgauu

SEQ ID NO: 5404 - DNA, 21 bp, Homo sapiens
cagctacagatactacttcaa

SEQ ID NO: 5405 - RNA, 21 nt, RNAi-sense strand
gcuacagauacuacuucaauu

SEQ ID NO: 5406 - RNA, 21 nt, RNAi-antisense strand
uugaaguaguaucuguagcuu

SEQ ID NO: 5407 - DNA, 21 bp, Homo sapiens
caagaaagtgagcgacgagtt

SEQ ID NO: 5408 - RNA, 21 nt, RNAi-sense strand
agaaagugagcgacgaguuuu

SEQ ID NO: 5409 - RNA, 21 nt, RNAi-antisense strand
aacucgucgcucacuuucuuu

SEQ ID NO: 5410 - DNA, 21 bp, Homo sapiens
gaaaggtgttggcattaaagg

SEQ ID NO: 5411 - RNA, 21 nt, RNAi-sense strand
aagguguuggcauuaaagguu

SEQ ID NO: 5412 - RNA, 21 nt, RNAi-antisense strand
ccuuuaaugccaacaccuuuu

SEQ ID NO: 5413 - DNA, 21 bp, Homo sapiens
gagagccatctaccgaaagta

SEQ ID NO: 5414 - RNA, 21 nt, RNAi-sense strand
gagccaucuaccgaaaguauu

SEQ ID NO: 5415 - RNA, 21 nt, RNAi-antisense strand
uacuuucgguagauggcucuu

SEQ ID NO: 5416 - DNA, 21 bp, Homo sapiens
gagccatctaccgaaagtaca

SEQ ID NO: 5417 - RNA, 21 nt, RNAi-sense strand
gccaucuaccgaaaguacauu

SEQ ID NO: 5418 - RNA, 21 nt, RNAi-antisense strand
uguacuuucgguagauggcuu

SEQ ID NO: 5419 - DNA, 21 bp, Homo sapiens
gataacaatggcatcgtgtcc

SEQ ID NO: 5420 - RNA, 21 nt, RNAi-sense strand
uaacaauggcaucguguccuu

SEQ ID NO: 5421 - RNA, 21 nt, RNAi-antisense strand
ggacacgaugccauuguuauu

SEQ ID NO: 5422 - DNA, 21 bp, Homo sapiens
gaccgaaatccaggccactat

SEQ ID NO: 5423 - RNA, 21 nt, RNAi-sense strand
ccgaaauccaggccacuauuu

SEQ ID NO: 5424 - RNA, 21 nt, RNAi-antisense strand
auaguggccuggauuucgguu

SEQ ID NO: 5425 - DNA, 21 bp, Homo sapiens
gaaatccaggccactatggag

SEQ ID NO: 5426 - RNA, 21 nt, RNAi-sense strand
aauccaggccacuauggaguu

SEQ ID NO: 5427 - RNA, 21 nt, RNAi-antisense strand
cuccauaguggccuggauuuu

SEQ ID NO: 5428 - DNA, 21 bp, Homo sapiens
gatacctgccgaccttaaatg

SEQ ID NO: 5429 - RNA, 21 nt, RNAi-sense strand
uaccugccgaccuuaaauguu

SEQ ID NO: 5430 - RNA, 21 nt, RNAi-antisense strand
cauuuaaggucggcagguauu

SEQ ID NO: 5431 - DNA, 21 bp, Homo sapiens
gaggctactcagagagtgttg

SEQ ID NO: 5432 - RNA, 21 nt, RNAi-sense strand
ggcuacucagagaguguuguu

SEQ ID NO: 5433 - RNA, 21 nt, RNAi-antisense strand
caacacucucugaguagccuu

SEQ ID NO: 5434 - DNA, 21 bp, Homo sapiens
tatttggaatatacgaggaca

SEQ ID NO: 5435 - RNA, 21 nt, RNAi-sense strand
uuuggaauauacgaggacauu

SEQ ID NO: 5436 - RNA, 21 nt, RNAi-antisense strand
uguccucguauauuccaaauu

SEQ ID NO: 5437 - DNA, 21 bp, Homo sapiens
tattatgtcaatgccggctat

SEQ ID NO: 5438 - RNA, 21 nt, RNAi-sense strand
uuaugucaaugccggcuauuu

SEQ ID NO: 5439 - RNA, 21 nt, RNAi-antisense strand
auagccggcauugacauaauu

SEQ ID NO: 5440 - DNA, 21 bp, Homo sapiens
aatttacatgtattggagacc

SEQ ID NO: 5441 - RNA, 21 nt, RNAi-sense strand
uuuacauguauuggagaccuu

SEQ ID NO: 5442 - RNA, 21 nt, RNAi-antisense strand
ggucuccaauacauguaaauu

SEQ ID NO: 5443 - DNA, 21 bp, Homo sapiens
aagatctcacattcttgaagg

SEQ ID NO: 5444 - RNA, 21 nt, RNAi-sense strand
gaucucacauucuugaagguu

SEQ ID NO: 5445 - RNA, 21 nt, RNAi-antisense strand
ccuucaagaaugugagaucuu

SEQ ID NO: 5446 - DNA, 21 bp, Homo sapiens
aaggtggcattgaagagcact

SEQ ID NO: 5447 - RNA, 21 nt, RNAi-sense strand
gguggcauugaagagcacuuu

SEQ ID NO: 5448 - RNA, 21 nt, RNAi-antisense strand
agugcucuucaaugccaccuu

SEQ ID NO: 5449 - DNA, 21 bp, Homo sapiens
aagagcactaagatcggaaga

SEQ ID NO: 5450 - RNA, 21 nt, RNAi-sense strand
gagcacuaagaucggaagauu

SEQ ID NO: 5451 - RNA, 21 nt, RNAi-antisense strand
ucuuccgaucuuagugcucuu

SEQ ID NO: 5452 - DNA, 21 bp, Homo sapiens
aagatcggaagatgagtgagc

SEQ ID NO: 5453 - RNA, 21 nt, RNAi-sense strand
gaucggaagaugagugagcuu

SEQ ID NO: 5454 - RNA, 21 nt, RNAi-antisense strand
gcucacucaucuuccgaucuu

SEQ ID NO: 5455 - DNA, 21 bp, Homo sapiens
aagatgagtgagcttgaccag

SEQ ID NO: 5456 - RNA, 21 nt, RNAi-sense strand
gaugagugagcuugaccaguu

SEQ ID NO: 5457 - RNA, 21 nt, RNAi-antisense strand
cuggucaagcucacucaucuu

SEQ ID NO: 5458 - DNA, 21 bp, Homo sapiens
aacttaagaaccagattcgag

SEQ ID NO: 5459 - RNA, 21 nt, RNAi-sense strand
cuuaagaaccagauucgaguu

SEQ ID NO: 5460 - RNA, 21 nt, RNAi-antisense strand
cucgaaucugguucuuaaguu

SEQ ID NO: 5461 - DNA, 21 bp, Homo sapiens
aagaaccagattcgagacgcc

SEQ ID NO: 5462 - RNA, 21 nt, RNAi-sense strand
gaaccagauucgagacgccuu

SEQ ID NO: 5463 - RNA, 21 nt, RNAi-antisense strand
ggcgucucgaaucugguucuu

SEQ ID NO: 5464 - DNA, 21 bp, Homo sapiens
aaccagattcgagacgccagg

SEQ ID NO: 5465 - RNA, 21 nt, RNAi-sense strand
ccagauucgagacgccagguu

SEQ ID NO: 5466 - RNA, 21 nt, RNAi-antisense strand
ccuggcgucucgaaucugguu

SEQ ID NO: 5467 - DNA, 21 bp, Homo sapiens
aaagcatgtgcagatgcaact

SEQ ID NO: 5468 - RNA, 21 nt, RNAi-sense strand
agcaugugcagaugcaacuuu

SEQ ID NO: 5469 - RNA, 21 nt, RNAi-antisense strand
aguugcaucugcacaugcuuu

SEQ ID NO: 5470 - DNA, 21 bp, Homo sapiens
aagcatgtgcagatgcaactc

SEQ ID NO: 5471 - RNA, 21 nt, RNAi-sense strand
gcaugugcagaugcaacucuu

SEQ ID NO: 5472 - RNA, 21 nt, RNAi-antisense strand
gaguugcaucugcacaugcuu

SEQ ID NO: 5473 - DNA, 21 bp, Homo sapiens
aactctctctcagatcacaaa

SEQ ID NO: 5474 - RNA, 21 nt, RNAi-sense strand
cucucucucagaucacaaauu

SEQ ID NO: 5475 - RNA, 21 nt, RNAi-antisense strand
uuugugaucugagagagaguu

SEQ ID NO: 5476 - DNA, 21 bp, Homo sapiens
aagaatccaaatgcgcacgag

SEQ ID NO: 5477 - RNA, 21 nt, RNAi-sense strand
gaauccaaaugcgcacgaguu

SEQ ID NO: 5478 - RNA, 21 nt, RNAi-antisense strand
cucgugcgcauuuggauucuu

SEQ ID NO: 5479 - DNA, 21 bp, Homo sapiens
aatccaaatgcgcacgaggag

SEQ ID NO: 5480 - RNA, 21 nt, RNAi-sense strand
uccaaaugcgcacgaggaguu

SEQ ID NO: 5481 - RNA, 21 nt, RNAi-antisense strand
cuccucgugcgcauuuggauu

SEQ ID NO: 5482 - DNA, 21 bp, Homo sapiens
aaatgcgcacgaggaggacac

SEQ ID NO: 5483 - RNA, 21 nt, RNAi-sense strand
augcgcacgaggaggacacuu

SEQ ID NO: 5484 - RNA, 21 nt, RNAi-antisense strand
guguccuccucgugcgcauuu

SEQ ID NO: 5485 - DNA, 21 bp, Homo sapiens
aatgcgcacgaggaggacact

SEQ ID NO: 5486 - RNA, 21 nt, RNAi-sense strand
ugcgcacgaggaggacacuuu

SEQ ID NO: 5487 - RNA, 21 nt, RNAi-antisense strand
aguguccuccucgugcgcauu

SEQ ID NO: 5488 - DNA, 21 bp, Homo sapiens
aagatctacgccatgcactgg

SEQ ID NO: 5489 - RNA, 21 nt, RNAi-sense strand
gaucuacgccaugcacugguu

SEQ ID NO: 5490 - RNA, 21 nt, RNAi-antisense strand
ccagugcauggcguagaucuu

SEQ ID NO: 5491 - DNA, 21 bp, Homo sapiens
aactatgtggcctgcggtggc

SEQ ID NO: 5492 - RNA, 21 nt, RNAi-sense strand
cuauguggccugcgguggcuu

SEQ ID NO: 5493 - RNA, 21 nt, RNAi-antisense strand
gccaccgcaggccacauaguu

SEQ ID NO: 5494 - DNA, 21 bp, Homo sapiens
aacgtgcgcgtgagtcgtgag

SEQ ID NO: 5495 - RNA, 21 nt, RNAi-sense strand
cgugcgcgugagucgugaguu

SEQ ID NO: 5496 - RNA, 21 nt, RNAi-antisense strand
cucacgacucacgcgcacguu

SEQ ID NO: 5497 - DNA, 21 bp, Homo sapiens
aatcagatcgtcaccagctct

SEQ ID NO: 5498 - RNA, 21 nt, RNAi-sense strand
ucagaucgucaccagcucuuu

SEQ ID NO: 5499 - RNA, 21 nt, RNAi-antisense strand
agagcuggugacgaucugauu

SEQ ID NO: 5500 - DNA, 21 bp, Homo sapiens
aaggcatgtgccggcagacct

SEQ ID NO: 5501 - RNA, 21 nt, RNAi-sense strand
ggcaugugccggcagaccuuu

SEQ ID NO: 5502 - RNA, 21 nt, RNAi-antisense strand
aggucugccggcacaugccuu

SEQ ID NO: 5503 - DNA, 21 bp, Homo sapiens
aatgccatttgcttctttcca

SEQ ID NO: 5504 - RNA, 21 nt, RNAi-sense strand
ugccauuugcuucuuuccauu

SEQ ID NO: 5505 - RNA, 21 nt, RNAi-antisense strand
uggaaagaagcaaauggcauu

SEQ ID NO: 5506 - DNA, 21 bp, Homo sapiens
aaatggcaatgcatttgccac

SEQ ID NO: 5507 - RNA, 21 nt, RNAi-sense strand
auggcaaugcauuugccacuu

SEQ ID NO: 5508 - RNA, 21 nt, RNAi-antisense strand
guggcaaaugcauugccauuu

SEQ ID NO: 5509 - DNA, 21 bp, Homo sapiens
aatggcaatgcatttgccact

SEQ ID NO: 5510 - RNA, 21 nt, RNAi-sense strand
uggcaaugcauuugccacuuu

SEQ ID NO: 5511 - RNA, 21 nt, RNAi-antisense strand
aguggcaaaugcauugccauu

SEQ ID NO: 5512 - DNA, 21 bp, Homo sapiens
aatgcatttgccactggctca

SEQ ID NO: 5513 - RNA, 21 nt, RNAi-sense strand
ugcauuugccacuggcucauu

SEQ ID NO: 5514 - RNA, 21 nt, RNAi-antisense strand
ugagccaguggcaaaugcauu

SEQ ID NO: 5515 - DNA, 21 bp, Homo sapiens
aagatctggaactaacgccag

SEQ ID NO: 5516 - RNA, 21 nt, RNAi-sense strand
gaucuggaacuaacgccaguu

SEQ ID NO: 5517 - RNA, 21 nt, RNAi-antisense strand
cuggcguuaguuccagaucuu

SEQ ID NO: 5518 - DNA, 21 bp, Homo sapiens
aactaacgccagtagcatgtg

SEQ ID NO: 5519 - RNA, 21 nt, RNAi-sense strand
cuaacgccaguagcauguguu

SEQ ID NO: 5520 - RNA, 21 nt, RNAi-antisense strand
cacaugcuacuggcguuaguu

SEQ ID NO: 5521 - DNA, 21 bp, Homo sapiens
aacgccagtagcatgtggatg

SEQ ID NO: 5522 - RNA, 21 nt, RNAi-sense strand
cgccaguagcauguggauguu

SEQ ID NO: 5523 - RNA, 21 nt, RNAi-antisense strand
cauccacaugcuacuggcguu

SEQ ID NO: 5524 - DNA, 21 bp, Homo sapiens
aagaccattccaacttggacg

SEQ ID NO: 5525 - RNA, 21 nt, RNAi-sense strand
gaccauuccaacuuggacguu

SEQ ID NO: 5526 - RNA, 21 nt, RNAi-antisense strand
cguccaaguuggaauggucuu

SEQ ID NO: 5527 - DNA, 21 bp, Homo sapiens
aacttggacgcgttaccatga

SEQ ID NO: 5528 - RNA, 21 nt, RNAi-sense strand
cuuggacgcguuaccaugauu

SEQ ID NO: 5529 - RNA, 21 nt, RNAi-antisense strand
ucaugguaacgcguccaaguu

SEQ ID NO: 5530 - DNA, 21 bp, Homo sapiens
aaccgtactaacgtggacacc

SEQ ID NO: 5531 - RNA, 21 nt, RNAi-sense strand
ccguacuaacguggacaccuu

SEQ ID NO: 5532 - RNA, 21 nt, RNAi-antisense strand
gguguccacguuaguacgguu

SEQ ID NO: 5533 - DNA, 21 bp, Homo sapiens
aaagatctctgtgctgtaaac

SEQ ID NO: 5534 - RNA, 21 nt, RNAi-sense strand
agaucucugugcuguaaacuu

SEQ ID NO: 5535 - RNA, 21 nt, RNAi-antisense strand
guuuacagcacagagaucuuu

SEQ ID NO: 5536 - DNA, 21 bp, Homo sapiens
aagatctctgtgctgtaaact

SEQ ID NO: 5537 - RNA, 21 nt, RNAi-sense strand
gaucucugugcuguaaacuuu

SEQ ID NO: 5538 - RNA, 21 nt, RNAi-antisense strand
aguuuacagcacagagaucuu

SEQ ID NO: 5539 - DNA, 21 bp, Homo sapiens
aaacaaattgtgcattccttc

SEQ ID NO: 5540 - RNA, 21 nt, RNAi-sense strand
acaaauugugcauuccuucuu

SEQ ID NO: 5541 - RNA, 21 nt, RNAi-antisense strand
gaaggaaugcacaauuuguuu

SEQ ID NO: 5542 - DNA, 21 bp, Homo sapiens
aacaaattgtgcattccttcc

SEQ ID NO: 5543 - RNA, 21 nt, RNAi-sense strand
caaauugugcauuccuuccuu

SEQ ID NO: 5544 - RNA, 21 nt, RNAi-antisense strand
ggaaggaaugcacaauuuguu

SEQ ID NO: 5545 - DNA, 21 bp, Homo sapiens
aatgttaaccagaaggtaaac

SEQ ID NO: 5546 - RNA, 21 nt, RNAi-sense strand
uguuaaccagaagguaaacuu

SEQ ID NO: 5547 - RNA, 21 nt, RNAi-antisense strand
guuuaccuucugguuaacauu

SEQ ID NO: 5548 - DNA, 21 bp, Homo sapiens
aaccagaaggtaaacttgagt

SEQ ID NO: 5549 - RNA, 21 nt, RNAi-sense strand
ccagaagguaaacuugaguuu

SEQ ID NO: 5550 - RNA, 21 nt, RNAi-antisense strand
acucaaguuuaccuucugguu

SEQ ID NO: 5551 - DNA, 21 bp, Homo sapiens
aaacttgagtgtaattgtcag

SEQ ID NO: 5552 - RNA, 21 nt, RNAi-sense strand
acuugaguguaauugucaguu

SEQ ID NO: 5553 - RNA, 21 nt, RNAi-antisense strand
cugacaauuacacucaaguuu

SEQ ID NO: 5554 - DNA, 21 bp, Homo sapiens
aacttgagtgtaattgtcaga

SEQ ID NO: 5555 - RNA, 21 nt, RNAi-sense strand
cuugaguguaauugucagauu

SEQ ID NO: 5556 - RNA, 21 nt, RNAi-antisense strand
ucugacaauuacacucaaguu

SEQ ID NO: 5557 - DNA, 21 bp, Homo sapiens
aattgtcagacagacacactt

SEQ ID NO: 5558 - RNA, 21 nt, RNAi-sense strand
uugucagacagacacacuuuu

SEQ ID NO: 5559 - RNA, 21 nt, RNAi-antisense strand
aagugugucugucugacaauu

SEQ ID NO: 5560 - DNA, 21 bp, Homo sapiens
aatttcagtcatgtttgtagc

SEQ ID NO: 5561 - RNA, 21 nt, RNAi-sense strand
uuucagucauguuuguagcuu

SEQ ID NO: 5562 - RNA, 21 nt, RNAi-antisense strand
gcuacaaacaugacugaaauu

SEQ ID NO: 5563 - DNA, 21 bp, Homo sapiens
aaagaacatgttcagaagcca

SEQ ID NO: 5564 - RNA, 21 nt, RNAi-sense strand
agaacauguucagaagccauu

SEQ ID NO: 5565 - RNA, 21 nt, RNAi-antisense strand
uggcuucugaacauguucuuu

SEQ ID NO: 5566 - DNA, 21 bp, Homo sapiens
aagaacatgttcagaagccat

SEQ ID NO: 5567 - RNA, 21 nt, RNAi-sense strand
gaacauguucagaagccauuu

SEQ ID NO: 5568 - RNA, 21 nt, RNAi-antisense strand
auggcuucugaacauguucuu

SEQ ID NO: 5569 - DNA, 21 bp, Homo sapiens
aaatgcgtgatcagagaatcc

SEQ ID NO: 5570 - RNA, 21 nt, RNAi-sense strand
augcgugaucagagaauccuu

SEQ ID NO: 5571 - RNA, 21 nt, RNAi-antisense strand
ggauucucugaucacgcauuu

SEQ ID NO: 5572 - DNA, 21 bp, Homo sapiens
aatgcgtgatcagagaatcct

SEQ ID NO: 5573 - RNA, 21 nt, RNAi-sense strand
ugcgugaucagagaauccuuu

SEQ ID NO: 5574 - RNA, 21 nt, RNAi-antisense strand
aggauucucugaucacgcauu

SEQ ID NO: 5575 - DNA, 21 bp, Homo sapiens
aatccttcacctttgctgaaa

SEQ ID NO: 5576 - RNA, 21 nt, RNAi-sense strand
uccuucaccuuugcugaaauu

SEQ ID NO: 5577 - RNA, 21 nt, RNAi-antisense strand
uuucagcaaaggugaaggauu

SEQ ID NO: 5578 - DNA, 21 bp, Homo sapiens
aaagtgagctcagatccagca

SEQ ID NO: 5579 - RNA, 21 nt, RNAi-sense strand
agugagcucagauccagcauu

SEQ ID NO: 5580 - RNA, 21 nt, RNAi-antisense strand
ugcuggaucugagcucacuuu

SEQ ID NO: 5581 - DNA, 21 bp, Homo sapiens
aagtgagctcagatccagcac

SEQ ID NO: 5582 - RNA, 21 nt, RNAi-sense strand
gugagcucagauccagcacuu

SEQ ID NO: 5583 - RNA, 21 nt, RNAi-antisense strand
gugcuggaucugagcucacuu

SEQ ID NO: 5584 - DNA, 21 bp, Homo sapiens
aactaggaggaacctctgttt

SEQ ID NO: 5585 - RNA, 21 nt, RNAi-sense strand
cuaggaggaaccucuguuuuu

SEQ ID NO: 5586 - RNA, 21 nt, RNAi-antisense strand
aaacagagguuccuccuaguu

SEQ ID NO: 5587 - DNA, 21 bp, Homo sapiens
aagagagatgcctgtcctgtg

SEQ ID NO: 5588 - RNA, 21 nt, RNAi-sense strand
gagagaugccuguccuguguu

SEQ ID NO: 5589 - RNA, 21 nt, RNAi-antisense strand
cacaggacaggcaucucucuu

SEQ ID NO: 5590 - DNA, 21 bp, Homo sapiens
aatgatctcagactttctaag

SEQ ID NO: 5591 - RNA, 21 nt, RNAi-sense strand
ugaucucagacuuucuaaguu

SEQ ID NO: 5592 - RNA, 21 nt, RNAi-antisense strand
cuuagaaagucugagaucauu

SEQ ID NO: 5593 - DNA, 21 bp, Homo sapiens
aatcgcatgctgtagaaatgc

SEQ ID NO: 5594 - RNA, 21 nt, RNAi-sense strand
ucgcaugcuguagaaaugcuu

SEQ ID NO: 5595 - RNA, 21 nt, RNAi-antisense strand
gcauuucuacagcaugcgauu

SEQ ID NO: 5596 - DNA, 21 bp, Homo sapiens
aacctcttacagttgtaacca

SEQ ID NO: 5597 - RNA, 21 nt, RNAi-sense strand
ccucuuacaguuguaaccauu

SEQ ID NO: 5598 - RNA, 21 nt, RNAi-antisense strand
ugguuacaacuguaagagguu

SEQ ID NO: 5599 - DNA, 21 bp, Homo sapiens
aaccattgcggctctgtccac

SEQ ID NO: 5600 - RNA, 21 nt, RNAi-sense strand
ccauugcggcucuguccacuu

SEQ ID NO: 5601 - RNA, 21 nt, RNAi-antisense strand
guggacagagccgcaaugguu

SEQ ID NO: 5602 - DNA, 21 bp, Homo sapiens
aaagttctgttgcaaacgact

SEQ ID NO: 5603 - RNA, 21 nt, RNAi-sense strand
aguucuguugcaaacgacuuu

SEQ ID NO: 5604 - RNA, 21 nt, RNAi-antisense strand
agucguuugcaacagaacuuu

SEQ ID NO: 5605 - DNA, 21 bp, Homo sapiens
aagttctgttgcaaacgactg

SEQ ID NO: 5606 - RNA, 21 nt, RNAi-sense strand
guucuguugcaaacgacuguu

SEQ ID NO: 5607 - RNA, 21 nt, RNAi-antisense strand
cagucguuugcaacagaacuu

SEQ ID NO: 5608 - DNA, 21 bp, Homo sapiens
aaacgactgctgttggattct

SEQ ID NO: 5609 - RNA, 21 nt, RNAi-sense strand
acgacugcuguuggauucuuu

SEQ ID NO: 5610 - RNA, 21 nt, RNAi-antisense strand
agaauccaacagcagucguuu

SEQ ID NO: 5611 - DNA, 21 bp, Homo sapiens
aacgactgctgttggattctg

SEQ ID NO: 5612 - RNA, 21 nt, RNAi-sense strand
cgacugcuguuggauucuguu

SEQ ID NO: 5613 - RNA, 21 nt, RNAi-antisense strand
cagaauccaacagcagucguu

SEQ ID NO: 5614 - DNA, 21 bp, Homo sapiens
aaggccagtgttcagcagcag

SEQ ID NO: 5615 - RNA, 21 nt, RNAi-sense strand
ggccaguguucagcagcaguu

SEQ ID NO: 5616 - RNA, 21 nt, RNAi-antisense strand
cugcugcugaacacuggccuu

SEQ ID NO: 5617 - DNA, 21 bp, Homo sapiens
aaactgtgctgtgaccttgcg

SEQ ID NO: 5618 - RNA, 21 nt, RNAi-sense strand
acugugcugugaccuugcguu

SEQ ID NO: 5619 - RNA, 21 nt, RNAi-antisense strand
cgcaaggucacagcacaguuu

SEQ ID NO: 5620 - DNA, 21 bp, Homo sapiens
aactgtgctgtgaccttgcgg

SEQ ID NO: 5621 - RNA, 21 nt, RNAi-sense strand
cugugcugugaccuugcgguu

SEQ ID NO: 5622 - RNA, 21 nt, RNAi-antisense strand
ccgcaaggucacagcacaguu

SEQ ID NO: 5623 - DNA, 21 bp, Homo sapiens
aacaactctgtagagctctct

SEQ ID NO: 5624 - RNA, 21 nt, RNAi-sense strand
caacucuguagagcucucuuu

SEQ ID NO: 5625 - RNA, 21 nt, RNAi-antisense strand
agagagcucuacagaguuguu

SEQ ID NO: 5626 - DNA, 21 bp, Homo sapiens
aactctgtagagctctctgca

SEQ ID NO: 5627 - RNA, 21 nt, RNAi-sense strand
cucuguagagcucucugcauu

SEQ ID NO: 5628 - RNA, 21 nt, RNAi-antisense strand
ugcagagagcucuacagaguu

SEQ ID NO: 5629 - DNA, 21 bp, Homo sapiens
aaagtcagtgtactgcaagga

SEQ ID NO: 5630 - RNA, 21 nt, RNAi-sense strand
agucaguguacugcaaggauu

SEQ ID NO: 5631 - RNA, 21 nt, RNAi-antisense strand
uccuugcaguacacugacuuu

SEQ ID NO: 5632 - DNA, 21 bp, Homo sapiens
aagtcagtgtactgcaaggaa

SEQ ID NO: 5633 - RNA, 21 nt, RNAi-sense strand
gucaguguacugcaaggaauu

SEQ ID NO: 5634 - RNA, 21 nt, RNAi-antisense strand
uuccuugcaguacacugacuu

SEQ ID NO: 5635 - DNA, 21 bp, Homo sapiens
aaggaagctggatgcaagata

SEQ ID NO: 5636 - RNA, 21 nt, RNAi-sense strand
ggaagcuggaugcaagauauu

SEQ ID NO: 5637 - RNA, 21 nt, RNAi-antisense strand
uaucuugcauccagcuuccuu

SEQ ID NO: 5638 - DNA, 21 bp, Homo sapiens
aagctggatgcaagatagata

SEQ ID NO: 5639 - RNA, 21 nt, RNAi-sense strand
gcuggaugcaagauagauauu

SEQ ID NO: 5640 - RNA, 21 nt, RNAi-antisense strand
uaucuaucuugcauccagcuu

SEQ ID NO: 5641 - DNA, 21 bp, Homo sapiens
catgtattggagaccagacca

SEQ ID NO: 5642 - RNA, 21 nt, RNAi-sense strand
uguauuggagaccagaccauu

SEQ ID NO: 5643 - RNA, 21 nt, RNAi-antisense strand
uggucuggucuccaauacauu

SEQ ID NO: 5644 - DNA, 21 bp, Homo sapiens
cacattcttgaaggtggcatt

SEQ ID NO: 5645 - RNA, 21 nt, RNAi-sense strand
cauucuugaagguggcauuuu

SEQ ID NO: 5646 - RNA, 21 nt, RNAi-antisense strand
aaugccaccuucaagaauguu

SEQ ID NO: 5647 - DNA, 21 bp, Homo sapiens
cattcttgaaggtggcattga

SEQ ID NO: 5648 - RNA, 21 nt, RNAi-sense strand
uucuugaagguggcauugauu

SEQ ID NO: 5649 - RNA, 21 nt, RNAi-antisense strand
ucaaugccaccuucaagaauu

SEQ ID NO: 5650 - DNA, 21 bp, Homo sapiens
cattgaagagcactaagatcg

SEQ ID NO: 5651 - RNA, 21 nt, RNAi-sense strand
uugaagagcacuaagaucguu

SEQ ID NO: 5652 - RNA, 21 nt, RNAi-antisense strand
cgaucuuagugcucuucaauu

SEQ ID NO: 5653 - DNA, 21 bp, Homo sapiens
cactaagatcggaagatgagt

SEQ ID NO: 5654 - RNA, 21 nt, RNAi-sense strand
cuaagaucggaagaugaguuu

SEQ ID NO: 5655 - RNA, 21 nt, RNAi-antisense strand
acucaucuuccgaucuuaguu

SEQ ID NO: 5656 - DNA, 21 bp, Homo sapiens
caggaggccgagcaacttaag

SEQ ID NO: 5657 - RNA, 21 nt, RNAi-sense strand
ggaggccgagcaacuuaaguu

SEQ ID NO: 5658 - RNA, 21 nt, RNAi-antisense strand
cuuaaguugcucggccuccuu

SEQ ID NO: 5659 - DNA, 21 bp, Homo sapiens
caacttaagaaccagattcga

SEQ ID NO: 5660 - RNA, 21 nt, RNAi-sense strand
acuuaagaaccagauucgauu

SEQ ID NO: 5661 - RNA, 21 nt, RNAi-antisense strand
ucgaaucugguucuuaaguuu

SEQ ID NO: 5662 - DNA, 21 bp, Homo sapiens
cagattcgagacgccaggaaa

SEQ ID NO: 5663 - RNA, 21 nt, RNAi-sense strand
gauucgagacgccaggaaauu

SEQ ID NO: 5664 - RNA, 21 nt, RNAi-antisense strand
uuuccuggcgucucgaaucuu

SEQ ID NO: 5665 - DNA, 21 bp, Homo sapiens
caggaaagcatgtgcagatgc

SEQ ID NO: 5666 - RNA, 21 nt, RNAi-sense strand
ggaaagcaugugcagaugcuu

SEQ ID NO: 5667 - RNA, 21 nt, RNAi-antisense strand
gcaucugcacaugcuuuccuu

SEQ ID NO: 5668 - DNA, 21 bp, Homo sapiens
catgtgcagatgcaactctct

SEQ ID NO: 5669 - RNA, 21 nt, RNAi-sense strand
ugugcagaugcaacucucuuu

SEQ ID NO: 5670 - RNA, 21 nt, RNAi-antisense strand
agagaguugcaucugcacauu

SEQ ID NO: 5671 - DNA, 21 bp, Homo sapiens
cagatgcaactctctctcaga

SEQ ID NO: 5672 - RNA, 21 nt, RNAi-sense strand
gaugcaacucucucucagauu

SEQ ID NO: 5673 - RNA, 21 nt, RNAi-antisense strand
ucugagagagaguugcaucuu

SEQ ID NO: 5674 - DNA, 21 bp, Homo sapiens
caactctctctcagatcacaa

SEQ ID NO: 5675 - RNA, 21 nt, RNAi-sense strand
acucucucucagaucacaauu

SEQ ID NO: 5676 - RNA, 21 nt, RNAi-antisense strand
uugugaucugagagagaguuu

SEQ ID NO: 5677 - DNA, 21 bp, Homo sapiens
cagatcacaaacaacatcgac

SEQ ID NO: 5678 - RNA, 21 nt, RNAi-sense strand
gaucacaaacaacaucgacuu

SEQ ID NO: 5679 - RNA, 21 nt, RNAi-antisense strand
gucgauguuguuugugaucuu

SEQ ID NO: 5680 - DNA, 21 bp, Homo sapiens
caaatgcgcacgaggaggaca

SEQ ID NO: 5681 - RNA, 21 nt, RNAi-sense strand
aaugcgcacgaggaggacauu

SEQ ID NO: 5682 - RNA, 21 nt, RNAi-antisense strand
uguccuccucgugcgcauuuu

SEQ ID NO: 5683 - DNA, 21 bp, Homo sapiens
cacctggccaagatctacgcc

SEQ ID NO: 5684 - RNA, 21 nt, RNAi-sense strand
ccuggccaagaucuacgccuu

SEQ ID NO: 5685 - RNA, 21 nt, RNAi-antisense strand
ggcguagaucuuggccagguu

SEQ ID NO: 5686 - DNA, 21 bp, Homo sapiens
caagatctacgccatgcactg

SEQ ID NO: 5687 - RNA, 21 nt, RNAi-sense strand
agaucuacgccaugcacuguu

SEQ ID NO: 5688 - RNA, 21 nt, RNAi-antisense strand
cagugcauggcguagaucuuu

SEQ ID NO: 5689 - DNA, 21 bp, Homo sapiens
cacagactccaggcttctcgt

SEQ ID NO: 5690 - RNA, 21 nt, RNAi-sense strand
cagacuccaggcuucucguuu

SEQ ID NO: 5691 - RNA, 21 nt, RNAi-antisense strand
acgagaagccuggagucuguu

SEQ ID NO: 5692 - DNA, 21 bp, Homo sapiens
cagactccaggcttctcgtca

SEQ ID NO: 5693 - RNA, 21 nt, RNAi-sense strand
gacuccaggcuucucgucauu

SEQ ID NO: 5694 - RNA, 21 nt, RNAi-antisense strand
ugacgagaagccuggagucuu

SEQ ID NO: 5695 - DNA, 21 bp, Homo sapiens
caggcttctcgtcagtgcctc

SEQ ID NO: 5696 - RNA, 21 nt, RNAi-sense strand
ggcuucucgucagugccucuu

SEQ ID NO: 5697 - RNA, 21 nt, RNAi-antisense strand
gaggcacugacgagaagccuu

SEQ ID NO: 5698 - DNA, 21 bp, Homo sapiens
cagtgcctcgcaggatggtaa

SEQ ID NO: 5699 - RNA, 21 nt, RNAi-sense strand
gugccucgcaggaugguaauu

SEQ ID NO: 5700 - RNA, 21 nt, RNAi-antisense strand
uuaccauccugcgaggcacuu

SEQ ID NO: 5701 - DNA, 21 bp, Homo sapiens
caggatggtaaacttatcatc

SEQ ID NO: 5702 - RNA, 21 nt, RNAi-sense strand
ggaugguaaacuuaucaucuu

SEQ ID NO: 5703 - RNA, 21 nt, RNAi-antisense strand
gaugauaaguuuaccauccuu

SEQ ID NO: 5704 - DNA, 21 bp, Homo sapiens
cagctacaccaccaacaaggt

SEQ ID NO: 5705 - RNA, 21 nt, RNAi-sense strand
gcuacaccaccaacaagguuu

SEQ ID NO: 5706 - RNA, 21 nt, RNAi-antisense strand
accuuguuggugguguagcuu

SEQ ID NO: 5707 - DNA, 21 bp, Homo sapiens
caccaccaacaaggtccacgc

SEQ ID NO: 5708 - RNA, 21 nt, RNAi-sense strand
ccaccaacaagguccacgcuu

SEQ ID NO: 5709 - RNA, 21 nt, RNAi-antisense strand
gcguggaccuuguuggugguu

SEQ ID NO: 5710 - DNA, 21 bp, Homo sapiens
caccaacaaggtccacgccat

SEQ ID NO: 5711 - RNA, 21 nt, RNAi-sense strand
ccaacaagguccacgccauuu

SEQ ID NO: 5712 - RNA, 21 nt, RNAi-antisense strand
auggcguggaccuuguugguu

SEQ ID NO: 5713 - DNA, 21 bp, Homo sapiens
catttgctccatttacaatct

SEQ ID NO: 5714 - RNA, 21 nt, RNAi-sense strand
uuugcuccauuuacaaucuuu

SEQ ID NO: 5715 - RNA, 21 nt, RNAi-antisense strand
agauuguaaauggagcaaauu

SEQ ID NO: 5716 - DNA, 21 bp, Homo sapiens
caggacacacaggttacctgt

SEQ ID NO: 5717 - RNA, 21 nt, RNAi-sense strand
ggacacacagguuaccuguuu

SEQ ID NO: 5718 - RNA, 21 nt, RNAi-antisense strand
acagguaaccuguguguccuu

SEQ ID NO: 5719 - DNA, 21 bp, Homo sapiens
cacacaggttacctgtcctgc

SEQ ID NO: 5720 - RNA, 21 nt, RNAi-sense strand
cacagguuaccuguccugcuu

SEQ ID NO: 5721 - RNA, 21 nt, RNAi-antisense strand
gcaggacagguaaccuguguu

SEQ ID NO: 5722 - DNA, 21 bp, Homo sapiens
cacaggttacctgtcctgctg

SEQ ID NO: 5723 - RNA, 21 nt, RNAi-sense strand
cagguuaccuguccugcuguu

SEQ ID NO: 5724 - RNA, 21 nt, RNAi-antisense strand
cagcaggacagguaaccuguu

SEQ ID NO: 5725 - DNA, 21 bp, Homo sapiens
caggttacctgtcctgctgcc

SEQ ID NO: 5726 - RNA, 21 nt, RNAi-sense strand
gguuaccuguccugcugccuu

SEQ ID NO: 5727 - RNA, 21 nt, RNAi-antisense strand
ggcagcaggacagguaaccuu

SEQ ID NO: 5728 - DNA, 21 bp, Homo sapiens
caatcagatcgtcaccagctc

SEQ ID NO: 5729 - RNA, 21 nt, RNAi-sense strand
aucagaucgucaccagcucuu

SEQ ID NO: 5730 - RNA, 21 nt, RNAi-antisense strand
gagcuggugacgaucugauuu

SEQ ID NO: 5731 - DNA, 21 bp, Homo sapiens
cagatcgtcaccagctctgga

SEQ ID NO: 5732 - RNA, 21 nt, RNAi-sense strand
gaucgucaccagcucuggauu

SEQ ID NO: 5733 - RNA, 21 nt, RNAi-antisense strand
uccagagcuggugacgaucuu

SEQ ID NO: 5734 - DNA, 21 bp, Homo sapiens
caccagctctggagacaccac

SEQ ID NO: 5735 - RNA, 21 nt, RNAi-sense strand
ccagcucuggagacaccacuu

SEQ ID NO: 5736 - RNA, 21 nt, RNAi-antisense strand
guggugucuccagagcugguu

SEQ ID NO: 5737 - DNA, 21 bp, Homo sapiens
cagctctggagacaccacgtg

SEQ ID NO: 5738 - RNA, 21 nt, RNAi-sense strand
gcucuggagacaccacguguu

SEQ ID NO: 5739 - RNA, 21 nt, RNAi-antisense strand
cacguggugucuccagagcuu

SEQ ID NO: 5740 - DNA, 21 bp, Homo sapiens
cagcagacgaccacgtttacc

SEQ ID NO: 5741 - RNA, 21 nt, RNAi-sense strand
gcagacgaccacguuuaccuu

SEQ ID NO: 5742 - RNA, 21 nt, RNAi-antisense strand
gguaaacguggucgucugcuu

SEQ ID NO: 5743 - DNA, 21 bp, Homo sapiens
cagacgaccacgtttaccgga

SEQ ID NO: 5744 - RNA, 21 nt, RNAi-sense strand
gacgaccacguuuaccggauu

SEQ ID NO: 5745 - RNA, 21 nt, RNAi-antisense strand
uccgguaaacguggucgucuu

SEQ ID NO: 5746 - DNA, 21 bp, Homo sapiens
cacgtttaccggacacactgg

SEQ ID NO: 5747 - RNA, 21 nt, RNAi-sense strand
cguuuaccggacacacugguu

SEQ ID NO: 5748 - RNA, 21 nt, RNAi-antisense strand
ccaguguguccgguaaacguu

SEQ ID NO: 5749 - DNA, 21 bp, Homo sapiens
cacactggagatgtcatgagc

SEQ ID NO: 5750 - RNA, 21 nt, RNAi-sense strand
cacuggagaugucaugagcuu

SEQ ID NO: 5751 - RNA, 21 nt, RNAi-antisense strand
gcucaugacaucuccaguguu

SEQ ID NO: 5752 - DNA, 21 bp, Homo sapiens
cactggagatgtcatgagcct

SEQ ID NO: 5753 - RNA, 21 nt, RNAi-sense strand
cuggagaugucaugagccuuu

SEQ ID NO: 5754 - RNA, 21 nt, RNAi-antisense strand
aggcucaugacaucuccaguu

SEQ ID NO: 5755 - DNA, 21 bp, Homo sapiens
catgagcctttctcttgctcc

SEQ ID NO: 5756 - RNA, 21 nt, RNAi-sense strand
ugagccuuucucuugcuccuu

SEQ ID NO: 5757 - RNA, 21 nt, RNAi-antisense strand
ggagcaagagaaaggcucauu

SEQ ID NO: 5758 - DNA, 21 bp, Homo sapiens
caccagactgttcgtctctgg

SEQ ID NO: 5759 - RNA, 21 nt, RNAi-sense strand
ccagacuguucgucucugguu

SEQ ID NO: 5760 - RNA, 21 nt, RNAi-antisense strand
ccagagacgaacagucugguu

SEQ ID NO: 5761 - DNA, 21 bp, Homo sapiens
cagactgttcgtctctggtgc

SEQ ID NO: 5762 - RNA, 21 nt, RNAi-sense strand
gacuguucgucucuggugcuu

SEQ ID NO: 5763 - RNA, 21 nt, RNAi-antisense strand
gcaccagagacgaacagucuu

SEQ ID NO: 5764 - DNA, 21 bp, Homo sapiens
catgtgccggcagaccttcac

SEQ ID NO: 5765 - RNA, 21 nt, RNAi-sense strand
ugugccggcagaccuucacuu

SEQ ID NO: 5766 - RNA, 21 nt, RNAi-antisense strand
gugaaggucugccggcacauu

SEQ ID NO: 5767 - DNA, 21 bp, Homo sapiens
cagaccttcactggccacgag

SEQ ID NO: 5768 - RNA, 21 nt, RNAi-sense strand
gaccuucacuggccacgaguu

SEQ ID NO: 5769 - RNA, 21 nt, RNAi-antisense strand
cucguggccagugaaggucuu

SEQ ID NO: 5770 - DNA, 21 bp, Homo sapiens
cactggccacgagtctgacat

SEQ ID NO: 5771 - RNA, 21 nt, RNAi-sense strand
cuggccacgagucugacauuu

SEQ ID NO: 5772 - RNA, 21 nt, RNAi-antisense strand
augucagacucguggccaguu

SEQ ID NO: 5773 - DNA, 21 bp, Homo sapiens
cacgagtctgacatcaatgcc

SEQ ID NO: 5774 - RNA, 21 nt, RNAi-sense strand
cgagucugacaucaaugccuu

SEQ ID NO: 5775 - RNA, 21 nt, RNAi-antisense strand
ggcauugaugucagacucguu

SEQ ID NO: 5776 - DNA, 21 bp, Homo sapiens
catcaatgccatttgcttctt

SEQ ID NO: 5777 - RNA, 21 nt, RNAi-sense strand
ucaaugccauuugcuucuuuu

SEQ ID NO: 5778 - RNA, 21 nt, RNAi-antisense strand
aagaagcaaauggcauugauu

SEQ ID NO: 5779 - DNA, 21 bp, Homo sapiens
caatgccatttgcttctttcc

SEQ ID NO: 5780 - RNA, 21 nt, RNAi-sense strand
augccauuugcuucuuuccuu

SEQ ID NO: 5781 - RNA, 21 nt, RNAi-antisense strand
ggaaagaagcaaauggcauuu

SEQ ID NO: 5782 - DNA, 21 bp, Homo sapiens
catttgcttctttccaaatgg

SEQ ID NO: 5783 - RNA, 21 nt, RNAi-sense strand
uuugcuucuuuccaaaugguu

SEQ ID NO: 5784 - RNA, 21 nt, RNAi-antisense strand
ccauuuggaaagaagcaaauu

SEQ ID NO: 5785 - DNA, 21 bp, Homo sapiens
caaatggcaatgcatttgcca

SEQ ID NO: 5786 - RNA, 21 nt, RNAi-sense strand
aauggcaaugcauuugccauu

SEQ ID NO: 5787 - RNA, 21 nt, RNAi-antisense strand
uggcaaaugcauugccauuuu

SEQ ID NO: 5788 - DNA, 21 bp, Homo sapiens
caatgcatttgccactggctc

SEQ ID NO: 5789 - RNA, 21 nt, RNAi-sense strand
augcauuugccacuggcucuu

SEQ ID NO: 5790 - RNA, 21 nt, RNAi-antisense strand
gagccaguggcaaaugcauuu

SEQ ID NO: 5791 - DNA, 21 bp, Homo sapiens
catttgccactggctcagacg

SEQ ID NO: 5792 - RNA, 21 nt, RNAi-sense strand
uuugccacuggcucagacguu

SEQ ID NO: 5793 - RNA, 21 nt, RNAi-antisense strand
cgucugagccaguggcaaauu

SEQ ID NO: 5794 - DNA, 21 bp, Homo sapiens
cacctgcaggctgtttgacct

SEQ ID NO: 5795 - RNA, 21 nt, RNAi-sense strand
ccugcaggcuguuugaccuuu

SEQ ID NO: 5796 - RNA, 21 nt, RNAi-antisense strand
aggucaaacagccugcagguu

SEQ ID NO: 5797 - DNA, 21 bp, Homo sapiens
caggctgtttgaccttcgtgc

SEQ ID NO: 5798 - RNA, 21 nt, RNAi-sense strand
ggcuguuugaccuucgugcuu

SEQ ID NO: 5799 - RNA, 21 nt, RNAi-antisense strand
gcacgaaggucaaacagccuu

SEQ ID NO: 5800 - DNA, 21 bp, Homo sapiens
caggagctcatgacttactcc

SEQ ID NO: 5801 - RNA, 21 nt, RNAi-sense strand
ggagcucaugacuuacuccuu

SEQ ID NO: 5802 - RNA, 21 nt, RNAi-antisense strand
ggaguaagucaugagcuccuu

SEQ ID NO: 5803 - DNA, 21 bp, Homo sapiens
cacctctgtctccttctccaa

SEQ ID NO: 5804 - RNA, 21 nt, RNAi-sense strand
ccucugucuccuucuccaauu

SEQ ID NO: 5805 - RNA, 21 nt, RNAi-antisense strand
uuggagaaggagacagagguu

SEQ ID NO: 5806 - DNA, 21 bp, Homo sapiens
catgacaaccgcgtcagctgc

SEQ ID NO: 5807 - RNA, 21 nt, RNAi-sense strand
ugacaaccgcgucagcugcuu

SEQ ID NO: 5808 - RNA, 21 nt, RNAi-antisense strand
gcagcugacgcgguugucauu

SEQ ID NO: 5809 - DNA, 21 bp, Homo sapiens
caagatctggaactaacgcca

SEQ ID NO: 5810 - RNA, 21 nt, RNAi-sense strand
agaucuggaacuaacgccauu

SEQ ID NO: 5811 - RNA, 21 nt, RNAi-antisense strand
uggcguuaguuccagaucuuu

SEQ ID NO: 5812 - DNA, 21 bp, Homo sapiens
cagtagcatgtggatgccatg

SEQ ID NO: 5813 - RNA, 21 nt, RNAi-sense strand
guagcauguggaugccauguu

SEQ ID NO: 5814 - RNA, 21 nt, RNAi-antisense strand
cauggcauccacaugcuacuu

SEQ ID NO: 5815 - DNA, 21 bp, Homo sapiens
catgtggatgccatggagact

SEQ ID NO: 5816 - RNA, 21 nt, RNAi-sense strand
uguggaugccauggagacuuu

SEQ ID NO: 5817 - RNA, 21 nt, RNAi-antisense strand
agucuccauggcauccacauu

SEQ ID NO: 5818 - DNA, 21 bp, Homo sapiens
catggagactggaagaccatt

SEQ ID NO: 5819 - RNA, 21 nt, RNAi-sense strand
uggagacuggaagaccauuuu

SEQ ID NO: 5820 - RNA, 21 nt, RNAi-antisense strand
aauggucuuccagucuccauu

SEQ ID NO: 5821 - DNA, 21 bp, Homo sapiens
cattccaacttggacgcgtta

SEQ ID NO: 5822 - RNA, 21 nt, RNAi-sense strand
uuccaacuuggacgcguuauu

SEQ ID NO: 5823 - RNA, 21 nt, RNAi-antisense strand
uaacgcguccaaguuggaauu

SEQ ID NO: 5824 - DNA, 21 bp, Homo sapiens
caacttggacgcgttaccatg

SEQ ID NO: 5825 - RNA, 21 nt, RNAi-sense strand
acuuggacgcguuaccauguu

SEQ ID NO: 5826 - RNA, 21 nt, RNAi-antisense strand
caugguaacgcguccaaguuu

SEQ ID NO: 5827 - DNA, 21 bp, Homo sapiens
catgagagcatatcctatcca

SEQ ID NO: 5828 - RNA, 21 nt, RNAi-sense strand
ugagagcauauccuauccauu

SEQ ID NO: 5829 - RNA, 21 nt, RNAi-antisense strand
uggauaggauaugcucucauu

SEQ ID NO: 5830 - DNA, 21 bp, Homo sapiens
catatcctatccaaccgtact

SEQ ID NO: 5831 - RNA, 21 nt, RNAi-sense strand
uauccuauccaaccguacuuu

SEQ ID NO: 5832 - RNA, 21 nt, RNAi-antisense strand
aguacgguuggauaggauauu

SEQ ID NO: 5833 - DNA, 21 bp, Homo sapiens
caaccgtactaacgtggacac

SEQ ID NO: 5834 - RNA, 21 nt, RNAi-sense strand
accguacuaacguggacacuu

SEQ ID NO: 5835 - RNA, 21 nt, RNAi-antisense strand
guguccacguuaguacgguuu

SEQ ID NO: 5836 - DNA, 21 bp, Homo sapiens
cacttattgctgaaaccaaga

SEQ ID NO: 5837 - RNA, 21 nt, RNAi-sense strand
cuuauugcugaaaccaagauu

SEQ ID NO: 5838 - RNA, 21 nt, RNAi-antisense strand
ucuugguuucagcaauaaguu

SEQ ID NO: 5839 - DNA, 21 bp, Homo sapiens
cattgagagaaagatctctgt

SEQ ID NO: 5840 - RNA, 21 nt, RNAi-sense strand
uugagagaaagaucucuguuu

SEQ ID NO: 5841 - RNA, 21 nt, RNAi-antisense strand
acagagaucuuucucucaauu

SEQ ID NO: 5842 - DNA, 21 bp, Homo sapiens
caaattgtgcattccttccgg

SEQ ID NO: 5843 - RNA, 21 nt, RNAi-sense strand
aauugugcauuccuuccgguu

SEQ ID NO: 5844 - RNA, 21 nt, RNAi-antisense strand
ccggaaggaaugcacaauuuu

SEQ ID NO: 5845 - DNA, 21 bp, Homo sapiens
cagaaggtaaacttgagtgta

SEQ ID NO: 5846 - RNA, 21 nt, RNAi-sense strand
gaagguaaacuugaguguauu

SEQ ID NO: 5847 - RNA, 21 nt, RNAi-antisense strand
uacacucaaguuuaccuucuu

SEQ ID NO: 5848 - DNA, 21 bp, Homo sapiens
catctggtcatcgtgtccaaa

SEQ ID NO: 5849 - RNA, 21 nt, RNAi-sense strand
ucuggucaucguguccaaauu

SEQ ID NO: 5850 - RNA, 21 nt, RNAi-antisense strand
uuuggacacgaugaccagauu

SEQ ID NO: 5851 - DNA, 21 bp, Homo sapiens
catcgtgtccaaatttcagtc

SEQ ID NO: 5852 - RNA, 21 nt, RNAi-sense strand
ucguguccaaauuucagucuu

SEQ ID NO: 5853 - RNA, 21 nt, RNAi-antisense strand
gacugaaauuuggacacgauu

SEQ ID NO: 5854 - DNA, 21 bp, Homo sapiens
cagtcatgtttgtagcaagat

SEQ ID NO: 5855 - RNA, 21 nt, RNAi-sense strand
gucauguuuguagcaagauuu

SEQ ID NO: 5856 - RNA, 21 nt, RNAi-antisense strand
aucuugcuacaaacaugacuu

SEQ ID NO: 5857 - DNA, 21 bp, Homo sapiens
cagcctctctgatgttgtcaa

SEQ ID NO: 5858 - RNA, 21 nt, RNAi-sense strand
gccucucugauguugucaauu

SEQ ID NO: 5859 - RNA, 21 nt, RNAi-antisense strand
uugacaacaucagagaggcuu

SEQ ID NO: 5860 - DNA, 21 bp, Homo sapiens
cacagatcattgttgcacaca

SEQ ID NO: 5861 - RNA, 21 nt, RNAi-sense strand
cagaucauuguugcacacauu

SEQ ID NO: 5862 - RNA, 21 nt, RNAi-antisense strand
ugugugcaacaaugaucuguu

SEQ ID NO: 5863 - DNA, 21 bp, Homo sapiens
cagatcattgttgcacacaaa

SEQ ID NO: 5864 - RNA, 21 nt, RNAi-sense strand
gaucauuguugcacacaaauu

SEQ ID NO: 5865 - RNA, 21 nt, RNAi-antisense strand
uuugugugcaacaaugaucuu

SEQ ID NO: 5866 - DNA, 21 bp, Homo sapiens
cattgttgcacacaaacgtgg

SEQ ID NO: 5867 - RNA, 21 nt, RNAi-sense strand
uuguugcacacaaacgugguu

SEQ ID NO: 5868 - RNA, 21 nt, RNAi-antisense strand
ccacguuugugugcaacaauu

SEQ ID NO: 5869 - DNA, 21 bp, Homo sapiens
cacacaaacgtggcatagaaa

SEQ ID NO: 5870 - RNA, 21 nt, RNAi-sense strand
cacaaacguggcauagaaauu

SEQ ID NO: 5871 - RNA, 21 nt, RNAi-antisense strand
uuucuaugccacguuuguguu

SEQ ID NO: 5872 - DNA, 21 bp, Homo sapiens
caaatgcgtgatcagagaatc

SEQ ID NO: 5873 - RNA, 21 nt, RNAi-sense strand
aaugcgugaucagagaaucuu

SEQ ID NO: 5874 - RNA, 21 nt, RNAi-antisense strand
gauucucugaucacgcauuuu

SEQ ID NO: 5875 - DNA, 21 bp, Homo sapiens
cagagaatccttcacctttgc

SEQ ID NO: 5876 - RNA, 21 nt, RNAi-sense strand
gagaauccuucaccuuugcuu

SEQ ID NO: 5877 - RNA, 21 nt, RNAi-antisense strand
gcaaaggugaaggauucucuu

SEQ ID NO: 5878 - DNA, 21 bp, Homo sapiens
cagatccagcaccatgttcct

SEQ ID NO: 5879 - RNA, 21 nt, RNAi-sense strand
gauccagcaccauguuccuuu

SEQ ID NO: 5880 - RNA, 21 nt, RNAi-antisense strand
aggaacauggugcuggaucuu

SEQ ID NO: 5881 - DNA, 21 bp, Homo sapiens
cagcaccatgttcctcctgac

SEQ ID NO: 5882 - RNA, 21 nt, RNAi-sense strand
gcaccauguuccuccugacuu

SEQ ID NO: 5883 - RNA, 21 nt, RNAi-antisense strand
gucaggaggaacauggugcuu

SEQ ID NO: 5884 - DNA, 21 bp, Homo sapiens
catcctgtctatcttctcagt

SEQ ID NO: 5885 - RNA, 21 nt, RNAi-sense strand
uccugucuaucuucucaguuu

SEQ ID NO: 5886 - RNA, 21 nt, RNAi-antisense strand
acugagaagauagacaggauu

SEQ ID NO: 5887 - DNA, 21 bp, Homo sapiens
caactaggaggaacctctgtt

SEQ ID NO: 5888 - RNA, 21 nt, RNAi-sense strand
acuaggaggaaccucuguuuu

SEQ ID NO: 5889 - RNA, 21 nt, RNAi-antisense strand
aacagagguuccuccuaguuu

SEQ ID NO: 5890 - DNA, 21 bp, Homo sapiens
caagagagatgcctgtcctgt

SEQ ID NO: 5891 - RNA, 21 nt, RNAi-sense strand
agagagaugccuguccuguuu

SEQ ID NO: 5892 - RNA, 21 nt, RNAi-antisense strand
acaggacaggcaucucucuuu

SEQ ID NO: 5893 - DNA, 21 bp, Homo sapiens
catgctgtagaaatgctcaaa

SEQ ID NO: 5894 - RNA, 21 nt, RNAi-sense strand
ugcuguagaaaugcucaaauu

SEQ ID NO: 5895 - RNA, 21 nt, RNAi-antisense strand
uuugagcauuucuacagcauu

SEQ ID NO: 5896 - DNA, 21 bp, Homo sapiens
cagttgtaaccattgcggctc

SEQ ID NO: 5897 - RNA, 21 nt, RNAi-sense strand
guuguaaccauugcggcucuu

SEQ ID NO: 5898 - RNA, 21 nt, RNAi-antisense strand
gagccgcaaugguuacaacuu

SEQ ID NO: 5899 - DNA, 21 bp, Homo sapiens
cattgcggctctgtccacttc

SEQ ID NO: 5900 - RNA, 21 nt, RNAi-sense strand
uugcggcucuguccacuucuu

SEQ ID NO: 5901 - RNA, 21 nt, RNAi-antisense strand
gaaguggacagagccgcaauu

SEQ ID NO: 5902 - DNA, 21 bp, Homo sapiens
cacttctcgttgctgctctgt

SEQ ID NO: 5903 - RNA, 21 nt, RNAi-sense strand
cuucucguugcugcucuguuu

SEQ ID NO: 5904 - RNA, 21 nt, RNAi-antisense strand
acagagcagcaacgagaaguu

SEQ ID NO: 5905 - DNA, 21 bp, Homo sapiens
cacatatcggaagcagtacag

SEQ ID NO: 5906 - RNA, 21 nt, RNAi-sense strand
cauaucggaagcaguacaguu

SEQ ID NO: 5907 - RNA, 21 nt, RNAi-antisense strand
cuguacugcuuccgauauguu

SEQ ID NO: 5908 - DNA, 21 bp, Homo sapiens
catatcggaagcagtacagcg

SEQ ID NO: 5909 - RNA, 21 nt, RNAi-sense strand
uaucggaagcaguacagcguu

SEQ ID NO: 5910 - RNA, 21 nt, RNAi-antisense strand
cgcuguacugcuuccgauauu

SEQ ID NO: 5911 - DNA, 21 bp, Homo sapiens
caaacgactgctgttggattc

SEQ ID NO: 5912 - RNA, 21 nt, RNAi-sense strand
aacgacugcuguuggauucuu

SEQ ID NO: 5913 - RNA, 21 nt, RNAi-antisense strand
gaauccaacagcagucguuuu

SEQ ID NO: 5914 - DNA, 21 bp, Homo sapiens
cacatctgaggtggctcattc

SEQ ID NO: 5915 - RNA, 21 nt, RNAi-sense strand
caucugagguggcucauucuu

SEQ ID NO: 5916 - RNA, 21 nt, RNAi-antisense strand
gaaugagccaccucagauguu

SEQ ID NO: 5917 - DNA, 21 bp, Homo sapiens
catcacacacagattgtcctg

SEQ ID NO: 5918 - RNA, 21 nt, RNAi-sense strand
ucacacacagauuguccuguu

SEQ ID NO: 5919 - RNA, 21 nt, RNAi-antisense strand
caggacaaucugugugugauu

SEQ ID NO: 5920 - DNA, 21 bp, Homo sapiens
cacacacagattgtcctggtg

SEQ ID NO: 5921 - RNA, 21 nt, RNAi-sense strand
cacacagauuguccugguguu

SEQ ID NO: 5922 - RNA, 21 nt, RNAi-antisense strand
caccaggacaaucuguguguu

SEQ ID NO: 5923 - DNA, 21 bp, Homo sapiens
cacacagattgtcctggtgtt

SEQ ID NO: 5924 - RNA, 21 nt, RNAi-sense strand
cacagauuguccugguguuuu

SEQ ID NO: 5925 - RNA, 21 nt, RNAi-antisense strand
aacaccaggacaaucuguguu

SEQ ID NO: 5926 - DNA, 21 bp, Homo sapiens
cacagattgtcctggtgttca

SEQ ID NO: 5927 - RNA, 21 nt, RNAi-sense strand
cagauuguccugguguucauu

SEQ ID NO: 5928 - RNA, 21 nt, RNAi-antisense strand
ugaacaccaggacaaucuguu

SEQ ID NO: 5929 - DNA, 21 bp, Homo sapiens
cagattgtcctggtgttcatt

SEQ ID NO: 5930 - RNA, 21 nt, RNAi-sense strand
gauuguccugguguucauuuu

SEQ ID NO: 5931 - RNA, 21 nt, RNAi-antisense strand
aaugaacaccaggacaaucuu

SEQ ID NO: 5932 - DNA, 21 bp, Homo sapiens
catttcaaggccagtgttcag

SEQ ID NO: 5933 - RNA, 21 nt, RNAi-sense strand
uuucaaggccaguguucaguu

SEQ ID NO: 5934 - RNA, 21 nt, RNAi-antisense strand
cugaacacuggccuugaaauu

SEQ ID NO: 5935 - DNA, 21 bp, Homo sapiens
caaggccagtgttcagcagca

SEQ ID NO: 5936 - RNA, 21 nt, RNAi-sense strand
aggccaguguucagcagcauu

SEQ ID NO: 5937 - RNA, 21 nt, RNAi-antisense strand
ugcugcugaacacuggccuuu

SEQ ID NO: 5938 - DNA, 21 bp, Homo sapiens
cagtgttcagcagcagcgttt

SEQ ID NO: 5939 - RNA, 21 nt, RNAi-sense strand
guguucagcagcagcguuuuu

SEQ ID NO: 5940 - RNA, 21 nt, RNAi-antisense strand
aaacgcugcugcugaacacuu

SEQ ID NO: 5941 - DNA, 21 bp, Homo sapiens
cagcagcagcgtttggaaagc

SEQ ID NO: 5942 - RNA, 21 nt, RNAi-sense strand
gcagcagcguuuggaaagcuu

SEQ ID NO: 5943 - RNA, 21 nt, RNAi-antisense strand
gcuuuccaaacgcugcugcuu

SEQ ID NO: 5944 - DNA, 21 bp, Homo sapiens
cagcagcgtttggaaagcagg

SEQ ID NO: 5945 - RNA, 21 nt, RNAi-sense strand
gcagcguuuggaaagcagguu

SEQ ID NO: 5946 - RNA, 21 nt, RNAi-antisense strand
ccugcuuuccaaacgcugcuu

SEQ ID NO: 5947 - DNA, 21 bp, Homo sapiens
cagcgtttggaaagcaggttc

SEQ ID NO: 5948 - RNA, 21 nt, RNAi-sense strand
gcguuuggaaagcagguucuu

SEQ ID NO: 5949 - RNA, 21 nt, RNAi-antisense strand
gaaccugcuuuccaaacgcuu

SEQ ID NO: 5950 - DNA, 21 bp, Homo sapiens
cactccttcatagcagcagta

SEQ ID NO: 5951 - RNA, 21 nt, RNAi-sense strand
cuccuucauagcagcaguauu

SEQ ID NO: 5952 - RNA, 21 nt, RNAi-antisense strand
uacugcugcuaugaaggaguu

SEQ ID NO: 5953 - DNA, 21 bp, Homo sapiens
catagcagcagtagtggcttc

SEQ ID NO: 5954 - RNA, 21 nt, RNAi-sense strand
uagcagcaguaguggcuucuu

SEQ ID NO: 5955 - RNA, 21 nt, RNAi-antisense strand
gaagccacuacugcugcuauu

SEQ ID NO: 5956 - DNA, 21 bp, Homo sapiens
cagcagtagtggcttctccat

SEQ ID NO: 5957 - RNA, 21 nt, RNAi-sense strand
gcaguaguggcuucuccauuu

SEQ ID NO: 5958 - RNA, 21 nt, RNAi-antisense strand
auggagaagccacuacugcuu

SEQ ID NO: 5959 - DNA, 21 bp, Homo sapiens
cagtagtggcttctccatcct

SEQ ID NO: 5960 - RNA, 21 nt, RNAi-sense strand
guaguggcuucuccauccuuu

SEQ ID NO: 5961 - RNA, 21 nt, RNAi-antisense strand
aggauggagaagccacuacuu

SEQ ID NO: 5962 - DNA, 21 bp, Homo sapiens
caacaactctgtagagctctc

SEQ ID NO: 5963 - RNA, 21 nt, RNAi-sense strand
acaacucuguagagcucucuu

SEQ ID NO: 5964 - RNA, 21 nt, RNAi-antisense strand
gagagcucuacagaguuguuu

SEQ ID NO: 5965 - DNA, 21 bp, Homo sapiens
caactctgtagagctctctgc

SEQ ID NO: 5966 - RNA, 21 nt, RNAi-sense strand
acucuguagagcucucugcuu

SEQ ID NO: 5967 - RNA, 21 nt, RNAi-antisense strand
gcagagagcucuacagaguuu

SEQ ID NO: 5968 - DNA, 21 bp, Homo sapiens
cagtgtactgcaaggaagctg

SEQ ID NO: 5969 - RNA, 21 nt, RNAi-sense strand
guguacugcaaggaagcuguu

SEQ ID NO: 5970 - RNA, 21 nt, RNAi-antisense strand
cagcuuccuugcaguacacuu

SEQ ID NO: 5971 - DNA, 21 bp, Homo sapiens
caaggaagctggatgcaagat

SEQ ID NO: 5972 - RNA, 21 nt, RNAi-sense strand
aggaagcuggaugcaagauuu

SEQ ID NO: 5973 - RNA, 21 nt, RNAi-antisense strand
aucuugcauccagcuuccuuu

SEQ ID NO: 5974 - DNA, 21 bp, Homo sapiens
gatctcacattcttgaaggtg

SEQ ID NO: 5975 - RNA, 21 nt, RNAi-sense strand
ucucacauucuugaagguguu

SEQ ID NO: 5976 - RNA, 21 nt, RNAi-antisense strand
caccuucaagaaugugagauu

SEQ ID NO: 5977 - DNA, 21 bp, Homo sapiens
gaaggtggcattgaagagcac

SEQ ID NO: 5978 - RNA, 21 nt, RNAi-sense strand
agguggcauugaagagcacuu

SEQ ID NO: 5979 - RNA, 21 nt, RNAi-antisense strand
gugcucuucaaugccaccuuu

SEQ ID NO: 5980 - DNA, 21 bp, Homo sapiens
gaagagcactaagatcggaag

SEQ ID NO: 5981 - RNA, 21 nt, RNAi-sense strand
agagcacuaagaucggaaguu

SEQ ID NO: 5982 - RNA, 21 nt, RNAi-antisense strand
cuuccgaucuuagugcucuuu

SEQ ID NO: 5983 - DNA, 21 bp, Homo sapiens
gagcactaagatcggaagatg

SEQ ID NO: 5984 - RNA, 21 nt, RNAi-sense strand
gcacuaagaucggaagauguu

SEQ ID NO: 5985 - RNA, 21 nt, RNAi-antisense strand
caucuuccgaucuuagugcuu

SEQ ID NO: 5986 - DNA, 21 bp, Homo sapiens
gatcggaagatgagtgagctt

SEQ ID NO: 5987 - RNA, 21 nt, RNAi-sense strand
ucggaagaugagugagcuuuu

SEQ ID NO: 5988 - RNA, 21 nt, RNAi-antisense strand
aagcucacucaucuuccgauu

SEQ ID NO: 5989 - DNA, 21 bp, Homo sapiens
gaagatgagtgagcttgacca

SEQ ID NO: 5990 - RNA, 21 nt, RNAi-sense strand
agaugagugagcuugaccauu

SEQ ID NO: 5991 - RNA, 21 nt, RNAi-antisense strand
uggucaagcucacucaucuuu

SEQ ID NO: 5992 - DNA, 21 bp, Homo sapiens
gatgagtgagcttgaccagtt

SEQ ID NO: 5993 - RNA, 21 nt, RNAi-sense strand
ugagugagcuugaccaguuuu

SEQ ID NO: 5994 - RNA, 21 nt, RNAi-antisense strand
aacuggucaagcucacucauu

SEQ ID NO: 5995 - DNA, 21 bp, Homo sapiens
gagtgagcttgaccagttacg

SEQ ID NO: 5996 - RNA, 21 nt, RNAi-sense strand
gugagcuugaccaguuacguu

SEQ ID NO: 5997 - RNA, 21 nt, RNAi-antisense strand
cguaacuggucaagcucacuu

SEQ ID NO: 5998 - DNA, 21 bp, Homo sapiens
gagcttgaccagttacggcag

SEQ ID NO: 5999 - RNA, 21 nt, RNAi-sense strand
gcuugaccaguuacggcaguu

SEQ ID NO: 6000 - RNA, 21 nt, RNAi-antisense strand
cugccguaacuggucaagcuu

SEQ ID NO: 6001 - DNA, 21 bp, Homo sapiens
gaggccgagcaacttaagaac

SEQ ID NO: 6002 - RNA, 21 nt, RNAi-sense strand
ggccgagcaacuuaagaacuu

SEQ ID NO: 6003 - RNA, 21 nt, RNAi-antisense strand
guucuuaaguugcucggccuu

SEQ ID NO: 6004 - DNA, 21 bp, Homo sapiens
gagcaacttaagaaccagatt

SEQ ID NO: 6005 - RNA, 21 nt, RNAi-sense strand
gcaacuuaagaaccagauuuu

SEQ ID NO: 6006 - RNA, 21 nt, RNAi-antisense strand
aaucugguucuuaaguugcuu

SEQ ID NO: 6007 - DNA, 21 bp, Homo sapiens
gaaccagattcgagacgccag

SEQ ID NO: 6008 - RNA, 21 nt, RNAi-sense strand
accagauucgagacgccaguu

SEQ ID NO: 6009 - RNA, 21 nt, RNAi-antisense strand
cuggcgucucgaaucugguuu

SEQ ID NO: 6010 - DNA, 21 bp, Homo sapiens
gattcgagacgccaggaaagc

SEQ ID NO: 6011 - RNA, 21 nt, RNAi-sense strand
uucgagacgccaggaaagcuu

SEQ ID NO: 6012 - RNA, 21 nt, RNAi-antisense strand
gcuuuccuggcgucucgaauu

SEQ ID NO: 6013 - DNA, 21 bp, Homo sapiens
gagacgccaggaaagcatgtg

SEQ ID NO: 6014 - RNA, 21 nt, RNAi-sense strand
gacgccaggaaagcauguguu

SEQ ID NO: 6015 - RNA, 21 nt, RNAi-antisense strand
cacaugcuuuccuggcgucuu

SEQ ID NO: 6016 - DNA, 21 bp, Homo sapiens
gacgccaggaaagcatgtgca

SEQ ID NO: 6017 - RNA, 21 nt, RNAi-sense strand
cgccaggaaagcaugugcauu

SEQ ID NO: 6018 - RNA, 21 nt, RNAi-antisense strand
ugcacaugcuuuccuggcguu

SEQ ID NO: 6019 - DNA, 21 bp, Homo sapiens
gaaagcatgtgcagatgcaac

SEQ ID NO: 6020 - RNA, 21 nt, RNAi-sense strand
aagcaugugcagaugcaacuu

SEQ ID NO: 6021 - RNA, 21 nt, RNAi-antisense strand
guugcaucugcacaugcuuuu

SEQ ID NO: 6022 - DNA, 21 bp, Homo sapiens
gatgcaactctctctcagatc

SEQ ID NO: 6023 - RNA, 21 nt, RNAi-sense strand
ugcaacucucucucagaucuu

SEQ ID NO: 6024 - RNA, 21 nt, RNAi-antisense strand
gaucugagagagaguugcauu

SEQ ID NO: 6025 - DNA, 21 bp, Homo sapiens
gaagaatccaaatgcgcacga

SEQ ID NO: 6026 - RNA, 21 nt, RNAi-sense strand
agaauccaaaugcgcacgauu

SEQ ID NO: 6027 - RNA, 21 nt, RNAi-antisense strand
ucgugcgcauuuggauucuuu

SEQ ID NO: 6028 - DNA, 21 bp, Homo sapiens
gaatccaaatgcgcacgagga

SEQ ID NO: 6029 - RNA, 21 nt, RNAi-sense strand
auccaaaugcgcacgaggauu

SEQ ID NO: 6030 - RNA, 21 nt, RNAi-antisense strand
uccucgugcgcauuuggauuu

SEQ ID NO: 6031 - DNA, 21 bp, Homo sapiens
gactccaggcttctcgtcagt

SEQ ID NO: 6032 - RNA, 21 nt, RNAi-sense strand
cuccaggcuucucgucaguuu

SEQ ID NO: 6033 - RNA, 21 nt, RNAi-antisense strand
acugacgagaagccuggaguu

SEQ ID NO: 6034 - DNA, 21 bp, Homo sapiens
gatggtaaacttatcatctgg

SEQ ID NO: 6035 - RNA, 21 nt, RNAi-sense strand
ugguaaacuuaucaucugguu

SEQ ID NO: 6036 - RNA, 21 nt, RNAi-antisense strand
ccagaugauaaguuuaccauu

SEQ ID NO: 6037 - DNA, 21 bp, Homo sapiens
gacagctacaccaccaacaag

SEQ ID NO: 6038 - RNA, 21 nt, RNAi-sense strand
cagcuacaccaccaacaaguu

SEQ ID NO: 6039 - RNA, 21 nt, RNAi-antisense strand
cuuguuggugguguagcuguu

SEQ ID NO: 6040 - DNA, 21 bp, Homo sapiens
gaactatgtggcctgcggtgg

SEQ ID NO: 6041 - RNA, 21 nt, RNAi-sense strand
acuauguggccugcggugguu

SEQ ID NO: 6042 - RNA, 21 nt, RNAi-antisense strand
ccaccgcaggccacauaguuu

SEQ ID NO: 6043 - DNA, 21 bp, Homo sapiens
gataacatttgctccatttac

SEQ ID NO: 6044 - RNA, 21 nt, RNAi-sense strand
uaacauuugcuccauuuacuu

SEQ ID NO: 6045 - RNA, 21 nt, RNAi-antisense strand
guaaauggagcaaauguuauu

SEQ ID NO: 6046 - DNA, 21 bp, Homo sapiens
gaacgtgcgcgtgagtcgtga

SEQ ID NO: 6047 - RNA, 21 nt, RNAi-sense strand
acgugcgcgugagucgugauu

SEQ ID NO: 6048 - RNA, 21 nt, RNAi-antisense strand
ucacgacucacgcgcacguuu

SEQ ID NO: 6049 - DNA, 21 bp, Homo sapiens
gagtcgtgagctggcaggaca

SEQ ID NO: 6050 - RNA, 21 nt, RNAi-sense strand
gucgugagcuggcaggacauu

SEQ ID NO: 6051 - RNA, 21 nt, RNAi-antisense strand
uguccugccagcucacgacuu

SEQ ID NO: 6052 - DNA, 21 bp, Homo sapiens
gagctggcaggacacacaggt

SEQ ID NO: 6053 - RNA, 21 nt, RNAi-sense strand
gcuggcaggacacacagguuu

SEQ ID NO: 6054 - RNA, 21 nt, RNAi-antisense strand
accuguguguccugccagcuu

SEQ ID NO: 6055 - DNA, 21 bp, Homo sapiens
gacacacaggttacctgtcct

SEQ ID NO: 6056 - RNA, 21 nt, RNAi-sense strand
cacacagguuaccuguccuuu

SEQ ID NO: 6057 - RNA, 21 nt, RNAi-antisense strand
aggacagguaaccuguguguu

SEQ ID NO: 6058 - DNA, 21 bp, Homo sapiens
gattcctggatgacaatcaga

SEQ ID NO: 6059 - RNA, 21 nt, RNAi-sense strand
uuccuggaugacaaucagauu

SEQ ID NO: 6060 - RNA, 21 nt, RNAi-antisense strand
ucugauugucauccaggaauu

SEQ ID NO: 6061 - DNA, 21 bp, Homo sapiens
gatgacaatcagatcgtcacc

SEQ ID NO: 6062 - RNA, 21 nt, RNAi-sense strand
ugacaaucagaucgucaccuu

SEQ ID NO: 6063 - RNA, 21 nt, RNAi-antisense strand
ggugacgaucugauugucauu

SEQ ID NO: 6064 - DNA, 21 bp, Homo sapiens
gacaatcagatcgtcaccagc

SEQ ID NO: 6065 - RNA, 21 nt, RNAi-sense strand
caaucagaucgucaccagcuu

SEQ ID NO: 6066 - RNA, 21 nt, RNAi-antisense strand
gcuggugacgaucugauuguu

SEQ ID NO: 6067 - DNA, 21 bp, Homo sapiens
gatcgtcaccagctctggaga

SEQ ID NO: 6068 - RNA, 21 nt, RNAi-sense strand
ucgucaccagcucuggagauu

SEQ ID NO: 6069 - RNA, 21 nt, RNAi-antisense strand
ucuccagagcuggugacgauu

SEQ ID NO: 6070 - DNA, 21 bp, Homo sapiens
gacgaccacgtttaccggaca

SEQ ID NO: 6071 - RNA, 21 nt, RNAi-sense strand
cgaccacguuuaccggacauu

SEQ ID NO: 6072 - RNA, 21 nt, RNAi-antisense strand
uguccgguaaacguggucguu

SEQ ID NO: 6073 - DNA, 21 bp, Homo sapiens
gaccacgtttaccggacacac

SEQ ID NO: 6074 - RNA, 21 nt, RNAi-sense strand
ccacguuuaccggacacacuu

SEQ ID NO: 6075 - RNA, 21 nt, RNAi-antisense strand
guguguccgguaaacgugguu

SEQ ID NO: 6076 - DNA, 21 bp, Homo sapiens
gacacactggagatgtcatga

SEQ ID NO: 6077 - RNA, 21 nt, RNAi-sense strand
cacacuggagaugucaugauu

SEQ ID NO: 6078 - RNA, 21 nt, RNAi-antisense strand
ucaugacaucuccaguguguu

SEQ ID NO: 6079 - DNA, 21 bp, Homo sapiens
gagatgtcatgagcctttctc

SEQ ID NO: 6080 - RNA, 21 nt, RNAi-sense strand
gaugucaugagccuuucucuu

SEQ ID NO: 6081 - RNA, 21 nt, RNAi-antisense strand
gagaaaggcucaugacaucuu

SEQ ID NO: 6082 - DNA, 21 bp, Homo sapiens
gatgtcatgagcctttctctt

SEQ ID NO: 6083 - RNA, 21 nt, RNAi-sense strand
ugucaugagccuuucucuuuu

SEQ ID NO: 6084 - RNA, 21 nt, RNAi-antisense strand
aagagaaaggcucaugacauu

SEQ ID NO: 6085 - DNA, 21 bp, Homo sapiens
gagcctttctcttgctcctga

SEQ ID NO: 6086 - RNA, 21 nt, RNAi-sense strand
gccuuucucuugcuccugauu

SEQ ID NO: 6087 - RNA, 21 nt, RNAi-antisense strand
ucaggagcaagagaaaggcuu

SEQ ID NO: 6088 - DNA, 21 bp, Homo sapiens
gacaccagactgttcgtctct

SEQ ID NO: 6089 - RNA, 21 nt, RNAi-sense strand
caccagacuguucgucucuuu

SEQ ID NO: 6090 - RNA, 21 nt, RNAi-antisense strand
agagacgaacagucugguguu

SEQ ID NO: 6091 - DNA, 21 bp, Homo sapiens
gactgttcgtctctggtgctt

SEQ ID NO: 6092 - RNA, 21 nt, RNAi-sense strand
cuguucgucucuggugcuuuu

SEQ ID NO: 6093 - RNA, 21 nt, RNAi-antisense strand
aagcaccagagacgaacaguu

SEQ ID NO: 6094 - DNA, 21 bp, Homo sapiens
gatgcttcagccaaactctgg

SEQ ID NO: 6095 - RNA, 21 nt, RNAi-sense strand
ugcuucagccaaacucugguu

SEQ ID NO: 6096 - RNA, 21 nt, RNAi-antisense strand
ccagaguuuggcugaagcauu

SEQ ID NO: 6097 - DNA, 21 bp, Homo sapiens
gatgtgcgagaaggcatgtgc

SEQ ID NO: 6098 - RNA, 21 nt, RNAi-sense strand
ugugcgagaaggcaugugcuu

SEQ ID NO: 6099 - RNA, 21 nt, RNAi-antisense strand
gcacaugccuucucgcacauu

SEQ ID NO: 6100 - DNA, 21 bp, Homo sapiens
gagaaggcatgtgccggcaga

SEQ ID NO: 6101 - RNA, 21 nt, RNAi-sense strand
gaaggcaugugccggcagauu

SEQ ID NO: 6102 - RNA, 21 nt, RNAi-antisense strand
ucugccggcacaugccuucuu

SEQ ID NO: 6103 - DNA, 21 bp, Homo sapiens
gaccttcactggccacgagtc

SEQ ID NO: 6104 - RNA, 21 nt, RNAi-sense strand
ccuucacuggccacgagucuu

SEQ ID NO: 6105 - RNA, 21 nt, RNAi-antisense strand
gacucguggccagugaagguu

SEQ ID NO: 6106 - DNA, 21 bp, Homo sapiens
gagtctgacatcaatgccatt

SEQ ID NO: 6107 - RNA, 21 nt, RNAi-sense strand
gucugacaucaaugccauuuu

SEQ ID NO: 6108 - RNA, 21 nt, RNAi-antisense strand
aauggcauugaugucagacuu

SEQ ID NO: 6109 - DNA, 21 bp, Homo sapiens
gacatcaatgccatttgcttc

SEQ ID NO: 6110 - RNA, 21 nt, RNAi-sense strand
caucaaugccauuugcuucuu

SEQ ID NO: 6111 - RNA, 21 nt, RNAi-antisense strand
gaagcaaauggcauugauguu

SEQ ID NO: 6112 - DNA, 21 bp, Homo sapiens
gacgccacctgcaggctgttt

SEQ ID NO: 6113 - RNA, 21 nt, RNAi-sense strand
cgccaccugcaggcuguuuuu

SEQ ID NO: 6114 - RNA, 21 nt, RNAi-antisense strand
aaacagccugcagguggcguu

SEQ ID NO: 6115 - DNA, 21 bp, Homo sapiens
gaccttcgtgctgaccaggag

SEQ ID NO: 6116 - RNA, 21 nt, RNAi-sense strand
ccuucgugcugaccaggaguu

SEQ ID NO: 6117 - RNA, 21 nt, RNAi-antisense strand
cuccuggucagcacgaagguu

SEQ ID NO: 6118 - DNA, 21 bp, Homo sapiens
gaccaggagctcatgacttac

SEQ ID NO: 6119 - RNA, 21 nt, RNAi-sense strand
ccaggagcucaugacuuacuu

SEQ ID NO: 6120 - RNA, 21 nt, RNAi-antisense strand
guaagucaugagcuccugguu

SEQ ID NO: 6121 - DNA, 21 bp, Homo sapiens
gatcacctctgtctccttctc

SEQ ID NO: 6122 - RNA, 21 nt, RNAi-sense strand
ucaccucugucuccuucucuu

SEQ ID NO: 6123 - RNA, 21 nt, RNAi-antisense strand
gagaaggagacagaggugauu

SEQ ID NO: 6124 - DNA, 21 bp, Homo sapiens
gacgacttcaactgcaacgtc

SEQ ID NO: 6125 - RNA, 21 nt, RNAi-sense strand
cgacuucaacugcaacgucuu

SEQ ID NO: 6126 - RNA, 21 nt, RNAi-antisense strand
gacguugcaguugaagucguu

SEQ ID NO: 6127 - DNA, 21 bp, Homo sapiens
gacttcaactgcaacgtctgg

SEQ ID NO: 6128 - RNA, 21 nt, RNAi-sense strand
cuucaacugcaacgucugguu

SEQ ID NO: 6129 - RNA, 21 nt, RNAi-antisense strand
ccagacguugcaguugaaguu

SEQ ID NO: 6130 - DNA, 21 bp, Homo sapiens
gatgcactcaaagccgaccgg

SEQ ID NO: 6131 - RNA, 21 nt, RNAi-sense strand
ugcacucaaagccgaccgguu

SEQ ID NO: 6132 - RNA, 21 nt, RNAi-antisense strand
ccggucggcuuugagugcauu

SEQ ID NO: 6133 - DNA, 21 bp, Homo sapiens
gactgacgatggcatggctgt

SEQ ID NO: 6134 - RNA, 21 nt, RNAi-sense strand
cugacgauggcauggcuguuu

SEQ ID NO: 6135 - RNA, 21 nt, RNAi-antisense strand
acagccaugccaucgucaguu

SEQ ID NO: 6136 - DNA, 21 bp, Homo sapiens
gatggcatggctgtggcgaca

SEQ ID NO: 6137 - RNA, 21 nt, RNAi-sense strand
uggcauggcuguggcgacauu

SEQ ID NO: 6138 - RNA, 21 nt, RNAi-antisense strand
ugucgccacagccaugccauu

SEQ ID NO: 6139 - DNA, 21 bp, Homo sapiens
gatagcttcctcaagatctgg

SEQ ID NO: 6140 - RNA, 21 nt, RNAi-sense strand
uagcuuccucaagaucugguu

SEQ ID NO: 6141 - RNA, 21 nt, RNAi-antisense strand
ccagaucuugaggaagcuauu

SEQ ID NO: 6142 - DNA, 21 bp, Homo sapiens
gatctggaactaacgccagta

SEQ ID NO: 6143 - RNA, 21 nt, RNAi-sense strand
ucuggaacuaacgccaguauu

SEQ ID NO: 6144 - RNA, 21 nt, RNAi-antisense strand
uacuggcguuaguuccagauu

SEQ ID NO: 6145 - DNA, 21 bp, Homo sapiens
gaactaacgccagtagcatgt

SEQ ID NO: 6146 - RNA, 21 nt, RNAi-sense strand
acuaacgccaguagcauguuu

SEQ ID NO: 6147 - RNA, 21 nt, RNAi-antisense strand
acaugcuacuggcguuaguuu

SEQ ID NO: 6148 - DNA, 21 bp, Homo sapiens
gatgccatggagactggaaga

SEQ ID NO: 6149 - RNA, 21 nt, RNAi-sense strand
ugccauggagacuggaagauu

SEQ ID NO: 6150 - RNA, 21 nt, RNAi-antisense strand
ucuuccagucuccauggcauu

SEQ ID NO: 6151 - DNA, 21 bp, Homo sapiens
gagactggaagaccattccaa

SEQ ID NO: 6152 - RNA, 21 nt, RNAi-sense strand
gacuggaagaccauuccaauu

SEQ ID NO: 6153 - RNA, 21 nt, RNAi-antisense strand
uuggaauggucuuccagucuu

SEQ ID NO: 6154 - DNA, 21 bp, Homo sapiens
gactggaagaccattccaact

SEQ ID NO: 6155 - RNA, 21 nt, RNAi-sense strand
cuggaagaccauuccaacuuu

SEQ ID NO: 6156 - RNA, 21 nt, RNAi-antisense strand
aguuggaauggucuuccaguu

SEQ ID NO: 6157 - DNA, 21 bp, Homo sapiens
gaagaccattccaacttggac

SEQ ID NO: 6158 - RNA, 21 nt, RNAi-sense strand
agaccauuccaacuuggacuu

SEQ ID NO: 6159 - RNA, 21 nt, RNAi-antisense strand
guccaaguuggaauggucuuu

SEQ ID NO: 6160 - DNA, 21 bp, Homo sapiens
gaccattccaacttggacgcg

SEQ ID NO: 6161 - RNA, 21 nt, RNAi-sense strand
ccauuccaacuuggacgcguu

SEQ ID NO: 6162 - RNA, 21 nt, RNAi-antisense strand
cgcguccaaguuggaaugguu

SEQ ID NO: 6163 - DNA, 21 bp, Homo sapiens
gacgcgttaccatgagagcat

SEQ ID NO: 6164 - RNA, 21 nt, RNAi-sense strand
cgcguuaccaugagagcauuu

SEQ ID NO: 6165 - RNA, 21 nt, RNAi-antisense strand
augcucucaugguaacgcguu

SEQ ID NO: 6166 - DNA, 21 bp, Homo sapiens
gagagcatatcctatccaacc

SEQ ID NO: 6167 - RNA, 21 nt, RNAi-sense strand
gagcauauccuauccaaccuu

SEQ ID NO: 6168 - RNA, 21 nt, RNAi-antisense strand
gguuggauaggauaugcucuu

SEQ ID NO: 6169 - DNA, 21 bp, Homo sapiens
gagcatatcctatccaaccgt

SEQ ID NO: 6170 - RNA, 21 nt, RNAi-sense strand
gcauauccuauccaaccguuu

SEQ ID NO: 6171 - RNA, 21 nt, RNAi-antisense strand
acgguuggauaggauaugcuu

SEQ ID NO: 6172 - DNA, 21 bp, Homo sapiens
gagagaaagatctctgtgctg

SEQ ID NO: 6173 - RNA, 21 nt, RNAi-sense strand
gagaaagaucucugugcuguu

SEQ ID NO: 6174 - RNA, 21 nt, RNAi-antisense strand
cagcacagagaucuuucucuu

SEQ ID NO: 6175 - DNA, 21 bp, Homo sapiens
gagaaagatctctgtgctgta

SEQ ID NO: 6176 - RNA, 21 nt, RNAi-sense strand
gaaagaucucugugcuguauu

SEQ ID NO: 6177 - RNA, 21 nt, RNAi-antisense strand
uacagcacagagaucuuucuu

SEQ ID NO: 6178 - DNA, 21 bp, Homo sapiens
gaaagatctctgtgctgtaaa

SEQ ID NO: 6179 - RNA, 21 nt, RNAi-sense strand
aagaucucugugcuguaaauu

SEQ ID NO: 6180 - RNA, 21 nt, RNAi-antisense strand
uuuacagcacagagaucuuuu

SEQ ID NO: 6181 - DNA, 21 bp, Homo sapiens
gatctctgtgctgtaaactaa

SEQ ID NO: 6182 - RNA, 21 nt, RNAi-sense strand
ucucugugcuguaaacuaauu

SEQ ID NO: 6183 - RNA, 21 nt, RNAi-antisense strand
uuaguuuacagcacagagauu

SEQ ID NO: 6184 - DNA, 21 bp, Homo sapiens
gaaggtaaacttgagtgtaat

SEQ ID NO: 6185 - RNA, 21 nt, RNAi-sense strand
agguaaacuugaguguaauuu

SEQ ID NO: 6186 - RNA, 21 nt, RNAi-antisense strand
auuacacucaaguuuaccuuu

SEQ ID NO: 6187 - DNA, 21 bp, Homo sapiens
gagtgtaattgtcagacagac

SEQ ID NO: 6188 - RNA, 21 nt, RNAi-sense strand
guguaauugucagacagacuu

SEQ ID NO: 6189 - RNA, 21 nt, RNAi-antisense strand
gucugucugacaauuacacuu

SEQ ID NO: 6190 - DNA, 21 bp, Homo sapiens
gatgtcacagatcattgttgc

SEQ ID NO: 6191 - RNA, 21 nt, RNAi-sense strand
ugucacagaucauuguugcuu

SEQ ID NO: 6192 - RNA, 21 nt, RNAi-antisense strand
gcaacaaugaucugugacauu

SEQ ID NO: 6193 - DNA, 21 bp, Homo sapiens
gatcattgttgcacacaaacg

SEQ ID NO: 6194 - RNA, 21 nt, RNAi-sense strand
ucauuguugcacacaaacguu

SEQ ID NO: 6195 - RNA, 21 nt, RNAi-antisense strand
cguuugugugcaacaaugauu

SEQ ID NO: 6196 - DNA, 21 bp, Homo sapiens
gaacatgttcagaagccatgg

SEQ ID NO: 6197 - RNA, 21 nt, RNAi-sense strand
acauguucagaagccaugguu

SEQ ID NO: 6198 - RNA, 21 nt, RNAi-antisense strand
ccauggcuucugaacauguuu

SEQ ID NO: 6199 - DNA, 21 bp, Homo sapiens
gacggtctcaaatgcgtgatc

SEQ ID NO: 6200 - RNA, 21 nt, RNAi-sense strand
cggucucaaaugcgugaucuu

SEQ ID NO: 6201 - RNA, 21 nt, RNAi-antisense strand
gaucacgcauuugagaccguu

SEQ ID NO: 6202 - DNA, 21 bp, Homo sapiens
gatcagagaatccttcacctt

SEQ ID NO: 6203 - RNA, 21 nt, RNAi-sense strand
ucagagaauccuucaccuuuu

SEQ ID NO: 6204 - RNA, 21 nt, RNAi-antisense strand
aaggugaaggauucucugauu

SEQ ID NO: 6205 - DNA, 21 bp, Homo sapiens
gagaatccttcacctttgctg

SEQ ID NO: 6206 - RNA, 21 nt, RNAi-sense strand
gaauccuucaccuuugcuguu

SEQ ID NO: 6207 - RNA, 21 nt, RNAi-antisense strand
cagcaaaggugaaggauucuu

SEQ ID NO: 6208 - DNA, 21 bp, Homo sapiens
gaatccttcacctttgctgaa

SEQ ID NO: 6209 - RNA, 21 nt, RNAi-sense strand
auccuucaccuuugcugaauu

SEQ ID NO: 6210 - RNA, 21 nt, RNAi-antisense strand
uucagcaaaggugaaggauuu

SEQ ID NO: 6211 - DNA, 21 bp, Homo sapiens
gagctcagatccagcaccatg

SEQ ID NO: 6212 - RNA, 21 nt, RNAi-sense strand
gcucagauccagcaccauguu

SEQ ID NO: 6213 - RNA, 21 nt, RNAi-antisense strand
cauggugcuggaucugagcuu

SEQ ID NO: 6214 - DNA, 21 bp, Homo sapiens
gatccagcaccatgttcctcc

SEQ ID NO: 6215 - RNA, 21 nt, RNAi-sense strand
uccagcaccauguuccuccuu

SEQ ID NO: 6216 - RNA, 21 nt, RNAi-antisense strand
ggaggaacauggugcuggauu

SEQ ID NO: 6217 - DNA, 21 bp, Homo sapiens
gagagatgcctgtcctgtgct

SEQ ID NO: 6218 - RNA, 21 nt, RNAi-sense strand
gagaugccuguccugugcuuu

SEQ ID NO: 6219 - RNA, 21 nt, RNAi-antisense strand
agcacaggacaggcaucucuu

SEQ ID NO: 6220 - DNA, 21 bp, Homo sapiens
gagatgcctgtcctgtgcttg

SEQ ID NO: 6221 - RNA, 21 nt, RNAi-sense strand
gaugccuguccugugcuuguu

SEQ ID NO: 6222 - RNA, 21 nt, RNAi-antisense strand
caagcacaggacaggcaucuu

SEQ ID NO: 6223 - DNA, 21 bp, Homo sapiens
gatgcctgtcctgtgcttgga

SEQ ID NO: 6224 - RNA, 21 nt, RNAi-sense strand
ugccuguccugugcuuggauu

SEQ ID NO: 6225 - RNA, 21 nt, RNAi-antisense strand
uccaagcacaggacaggcauu

SEQ ID NO: 6226 - DNA, 21 bp, Homo sapiens
gatctcagactttctaagtta

SEQ ID NO: 6227 - RNA, 21 nt, RNAi-sense strand
ucucagacuuucuaaguuauu

SEQ ID NO: 6228 - RNA, 21 nt, RNAi-antisense strand
uaacuuagaaagucugagauu

SEQ ID NO: 6229 - DNA, 21 bp, Homo sapiens
gaatcgcatgctgtagaaatg

SEQ ID NO: 6230 - RNA, 21 nt, RNAi-sense strand
aucgcaugcuguagaaauguu

SEQ ID NO: 6231 - RNA, 21 nt, RNAi-antisense strand
cauuucuacagcaugcgauuu

SEQ ID NO: 6232 - DNA, 21 bp, Homo sapiens
gactcagtccttaggtgttct

SEQ ID NO: 6233 - RNA, 21 nt, RNAi-sense strand
cucaguccuuagguguucuuu

SEQ ID NO: 6234 - RNA, 21 nt, RNAi-antisense strand
agaacaccuaaggacugaguu

SEQ ID NO: 6235 - DNA, 21 bp, Homo sapiens
gaaataacctcttacagttgt

SEQ ID NO: 6236 - RNA, 21 nt, RNAi-sense strand
aauaaccucuuacaguuguuu

SEQ ID NO: 6237 - RNA, 21 nt, RNAi-antisense strand
acaacuguaagagguuauuuu

SEQ ID NO: 6238 - DNA, 21 bp, Homo sapiens
gactgctgttggattctgagg

SEQ ID NO: 6239 - RNA, 21 nt, RNAi-sense strand
cugcuguuggauucugagguu

SEQ ID NO: 6240 - RNA, 21 nt, RNAi-antisense strand
ccucagaauccaacagcaguu

SEQ ID NO: 6241 - DNA, 21 bp, Homo sapiens
gattgtcctggtgttcatttc

SEQ ID NO: 6242 - RNA, 21 nt, RNAi-sense strand
uuguccugguguucauuucuu

SEQ ID NO: 6243 - RNA, 21 nt, RNAi-antisense strand
gaaaugaacaccaggacaauu

SEQ ID NO: 6244 - DNA, 21 bp, Homo sapiens
gaccttgcggtaggcctggat

SEQ ID NO: 6245 - RNA, 21 nt, RNAi-sense strand
ccuugcgguaggccuggauuu

SEQ ID NO: 6246 - RNA, 21 nt, RNAi-antisense strand
auccaggccuaccgcaagguu

SEQ ID NO: 6247 - DNA, 21 bp, Homo sapiens
gatctggcaaagagaatacaa

SEQ ID NO: 6248 - RNA, 21 nt, RNAi-sense strand
ucuggcaaagagaauacaauu

SEQ ID NO: 6249 - RNA, 21 nt, RNAi-antisense strand
uuguauucucuuugccagauu

SEQ ID NO: 6250 - DNA, 21 bp, Homo sapiens
gaagctggatgcaagatagat

SEQ ID NO: 6251 - RNA, 21 nt, RNAi-sense strand
agcuggaugcaagauagauuu

SEQ ID NO: 6252 - RNA, 21 nt, RNAi-antisense strand
aucuaucuugcauccagcuuu

SEQ ID NO: 6253 - DNA, 21 bp, Homo sapiens
gatgtaataaagcagtttgac

SEQ ID NO: 6254 - RNA, 21 nt, RNAi-sense strand
uguaauaaagcaguuugacuu

SEQ ID NO: 6255 - RNA, 21 nt, RNAi-antisense strand
gucaaacugcuuuauuacauu

SEQ ID NO: 6256 - DNA, 21 bp, Homo sapiens
tacatgtattggagaccagac

SEQ ID NO: 6257 - RNA, 21 nt, RNAi-sense strand
cauguauuggagaccagacuu

SEQ ID NO: 6258 - RNA, 21 nt, RNAi-antisense strand
gucuggucuccaauacauguu

SEQ ID NO: 6259 - DNA, 21 bp, Homo sapiens
tattggagaccagaccagaag

SEQ ID NO: 6260 - RNA, 21 nt, RNAi-sense strand
uuggagaccagaccagaaguu

SEQ ID NO: 6261 - RNA, 21 nt, RNAi-antisense strand
cuucuggucuggucuccaauu

SEQ ID NO: 6262 - DNA, 21 bp, Homo sapiens
taagatctcacattcttgaag

SEQ ID NO: 6263 - RNA, 21 nt, RNAi-sense strand
agaucucacauucuugaaguu

SEQ ID NO: 6264 - RNA, 21 nt, RNAi-antisense strand
cuucaagaaugugagaucuuu

SEQ ID NO: 6265 - DNA, 21 bp, Homo sapiens
taagatcggaagatgagtgag

SEQ ID NO: 6266 - RNA, 21 nt, RNAi-sense strand
agaucggaagaugagugaguu

SEQ ID NO: 6267 - RNA, 21 nt, RNAi-antisense strand
cucacucaucuuccgaucuuu

SEQ ID NO: 6268 - DNA, 21 bp, Homo sapiens
taagaaccagattcgagacgc

SEQ ID NO: 6269 - RNA, 21 nt, RNAi-sense strand
agaaccagauucgagacgcuu

SEQ ID NO: 6270 - RNA, 21 nt, RNAi-antisense strand
gcgucucgaaucugguucuuu

SEQ ID NO: 6271 - DNA, 21 bp, Homo sapiens
tacaccaccaacaaggtccac

SEQ ID NO: 6272 - RNA, 21 nt, RNAi-sense strand
caccaccaacaagguccacuu

SEQ ID NO: 6273 - RNA, 21 nt, RNAi-antisense strand
guggaccuuguuggugguguu

SEQ ID NO: 6274 - DNA, 21 bp, Homo sapiens
tacctgtcctgctgccgattc

SEQ ID NO: 6275 - RNA, 21 nt, RNAi-sense strand
ccuguccugcugccgauucuu

SEQ ID NO: 6276 - RNA, 21 nt, RNAi-antisense strand
gaaucggcagcaggacagguu

SEQ ID NO: 6277 - DNA, 21 bp, Homo sapiens
taccggacacactggagatgt

SEQ ID NO: 6278 - RNA, 21 nt, RNAi-sense strand
ccggacacacuggagauguuu

SEQ ID NO: 6279 - RNA, 21 nt, RNAi-antisense strand
acaucuccaguguguccgguu

SEQ ID NO: 6280 - DNA, 21 bp, Homo sapiens
tacgacgacttcaactgcaac

SEQ ID NO: 6281 - RNA, 21 nt, RNAi-sense strand
cgacgacuucaacugcaacuu

SEQ ID NO: 6282 - RNA, 21 nt, RNAi-antisense strand
guugcaguugaagucgucguu

SEQ ID NO: 6283 - DNA, 21 bp, Homo sapiens
tagcttcctcaagatctggaa

SEQ ID NO: 6284 - RNA, 21 nt, RNAi-sense strand
gcuuccucaagaucuggaauu

SEQ ID NO: 6285 - RNA, 21 nt, RNAi-antisense strand
uuccagaucuugaggaagcuu

SEQ ID NO: 6286 - DNA, 21 bp, Homo sapiens
taacgccagtagcatgtggat

SEQ ID NO: 6287 - RNA, 21 nt, RNAi-sense strand
acgccaguagcauguggauuu

SEQ ID NO: 6288 - RNA, 21 nt, RNAi-antisense strand
auccacaugcuacuggcguuu

SEQ ID NO: 6289 - DNA, 21 bp, Homo sapiens
tagcatgtggatgccatggag

SEQ ID NO: 6290 - RNA, 21 nt, RNAi-sense strand
gcauguggaugccauggaguu

SEQ ID NO: 6291 - RNA, 21 nt, RNAi-antisense strand
cuccauggcauccacaugcuu

SEQ ID NO: 6292 - DNA, 21 bp, Homo sapiens
taccatgagagcatatcctat

SEQ ID NO: 6293 - RNA, 21 nt, RNAi-sense strand
ccaugagagcauauccuauuu

SEQ ID NO: 6294 - RNA, 21 nt, RNAi-antisense strand
auaggauaugcucucaugguu

SEQ ID NO: 6295 - DNA, 21 bp, Homo sapiens
tatcctatccaaccgtactaa

SEQ ID NO: 6296 - RNA, 21 nt, RNAi-sense strand
uccuauccaaccguacuaauu

SEQ ID NO: 6297 - RNA, 21 nt, RNAi-antisense strand
uuaguacgguuggauaggauu

SEQ ID NO: 6298 - DNA, 21 bp, Homo sapiens
tatccaaccgtactaacgtgg

SEQ ID NO: 6299 - RNA, 21 nt, RNAi-sense strand
uccaaccguacuaacgugguu

SEQ ID NO: 6300 - RNA, 21 nt, RNAi-antisense strand
ccacguuaguacgguuggauu

SEQ ID NO: 6301 - DNA, 21 bp, Homo sapiens
tattgctgaaaccaagagcac

SEQ ID NO: 6302 - RNA, 21 nt, RNAi-sense strand
uugcugaaaccaagagcacuu

SEQ ID NO: 6303 - RNA, 21 nt, RNAi-antisense strand
gugcucuugguuucagcaauu

SEQ ID NO: 6304 - DNA, 21 bp, Homo sapiens
taaccagaaggtaaacttgag

SEQ ID NO: 6305 - RNA, 21 nt, RNAi-sense strand
accagaagguaaacuugaguu

SEQ ID NO: 6306 - RNA, 21 nt, RNAi-antisense strand
cucaaguuuaccuucugguuu

SEQ ID NO: 6307 - DNA, 21 bp, Homo sapiens
taattgtcagacagacacact

SEQ ID NO: 6308 - RNA, 21 nt, RNAi-sense strand
auugucagacagacacacuuu

SEQ ID NO: 6309 - RNA, 21 nt, RNAi-antisense strand
agugugucugucugacaauuu

SEQ ID NO: 6310 - DNA, 21 bp, Homo sapiens
tattcctttgtgttcaacagt

SEQ ID NO: 6311 - RNA, 21 nt, RNAi-sense strand
uuccuuuguguucaacaguuu

SEQ ID NO: 6312 - RNA, 21 nt, RNAi-antisense strand
acuguugaacacaaaggaauu

SEQ ID NO: 6313 - DNA, 21 bp, Homo sapiens
tactcttagaatcgcatgctg

SEQ ID NO: 6314 - RNA, 21 nt, RNAi-sense strand
cucuuagaaucgcaugcuguu

SEQ ID NO: 6315 - RNA, 21 nt, RNAi-antisense strand
cagcaugcgauucuaagaguu

SEQ ID NO: 6316 - DNA, 21 bp, Homo sapiens
tagaatcgcatgctgtagaaa

SEQ ID NO: 6317 - RNA, 21 nt, RNAi-sense strand
gaaucgcaugcuguagaaauu

SEQ ID NO: 6318 - RNA, 21 nt, RNAi-antisense strand
uuucuacagcaugcgauucuu

SEQ ID NO: 6319 - DNA, 21 bp, Homo sapiens
taacctcttacagttgtaacc

SEQ ID NO: 6320 - RNA, 21 nt, RNAi-sense strand
accucuuacaguuguaaccuu

SEQ ID NO: 6321 - RNA, 21 nt, RNAi-antisense strand
gguuacaacuguaagagguuu

SEQ ID NO: 6322 - DNA, 21 bp, Homo sapiens
tacagttgtaaccattgcggc

SEQ ID NO: 6323 - RNA, 21 nt, RNAi-sense strand
caguuguaaccauugcggcuu

SEQ ID NO: 6324 - RNA, 21 nt, RNAi-antisense strand
gccgcaaugguuacaacuguu

SEQ ID NO: 6325 - DNA, 21 bp, Homo sapiens
taaccattgcggctctgtcca

SEQ ID NO: 6326 - RNA, 21 nt, RNAi-sense strand
accauugcggcucuguccauu

SEQ ID NO: 6327 - RNA, 21 nt, RNAi-antisense strand
uggacagagccgcaaugguuu

SEQ ID NO: 6328 - DNA, 21 bp, Homo sapiens
tatcggaagcagtacagcgcg

SEQ ID NO: 6329 - RNA, 21 nt, RNAi-sense strand
ucggaagcaguacagcgcguu

SEQ ID NO: 6330 - RNA, 21 nt, RNAi-antisense strand
cgcgcuguacugcuuccgauu

SEQ ID NO: 6331 - DNA, 21 bp, Homo sapiens
tagcagcagtagtggcttctc

SEQ ID NO: 6332 - RNA, 21 nt, RNAi-sense strand
gcagcaguaguggcuucucuu

SEQ ID NO: 6333 - RNA, 21 nt, RNAi-antisense strand
gagaagccacuacugcugcuu

SEQ ID NO: 6334 - DNA, 21 bp, Homo sapiens
tagtggcttctccatcctgtt

SEQ ID NO: 6335 - RNA, 21 nt, RNAi-sense strand
guggcuucuccauccuguuuu

SEQ ID NO: 6336 - RNA, 21 nt, RNAi-antisense strand
aacaggauggagaagccacuu

SEQ ID NO: 6337 - DNA, 21 bp, Homo sapiens
taggcctggatctggcaaaga

SEQ ID NO: 6338 - RNA, 21 nt, RNAi-sense strand
ggccuggaucuggcaaagauu

SEQ ID NO: 6339 - RNA, 21 nt, RNAi-antisense strand
ucuuugccagauccaggccuu

SEQ ID NO: 6340 - DNA, 21 bp, Homo sapiens
taaagtcagtgtactgcaagg

SEQ ID NO: 6341 - RNA, 21 nt, RNAi-sense strand
aagucaguguacugcaagguu

SEQ ID NO: 6342 - RNA, 21 nt, RNAi-antisense strand
ccuugcaguacacugacuuuu

SEQ ID NO: 6343 - DNA, 21 bp, Homo sapiens
tactgcaaggaagctggatgc

SEQ ID NO: 6344 - RNA, 21 nt, RNAi-sense strand
cugcaaggaagcuggaugcuu

SEQ ID NO: 6345 - RNA, 21 nt, RNAi-antisense strand
gcauccagcuuccuugcaguu

SEQ ID NO: 6346 - DNA, 21 bp, Homo sapiens
aagaatccaaatgcgcacgag

SEQ ID NO: 6347 - RNA, 21 nt, RNAi-sense strand
gaauccaaaugcgcacgaguu

SEQ ID NO: 6348 - RNA, 21 nt, RNAi-antisense strand
cucgugcgcauuuggauucuu

SEQ ID NO: 6349 - DNA, 21 bp, Homo sapiens
caggatggtaaacttatcatc

SEQ ID NO: 6350 - RNA, 21 nt, RNAi-sense strand
ggaugguaaacuuaucaucuu

SEQ ID NO: 6351 - RNA, 21 nt, RNAi-antisense strand
gaugauaaguuuaccauccuu

SEQ ID NO: 6352 - DNA, 21 bp, Homo sapiens
caatcagatcgtcaccagctc

SEQ ID NO: 6353 - RNA, 21 nt, RNAi-sense strand
aucagaucgucaccagcucuu

SEQ ID NO: 6354 - RNA, 21 nt, RNAi-antisense strand
gagcuggugacgaucugauuu

SEQ ID NO: 6355 - DNA, 21 bp, Homo sapiens
gaagaatccaaatgcgcacga

SEQ ID NO: 6356 - RNA, 21 nt, RNAi-sense strand
agaauccaaaugcgcacgauu

SEQ ID NO: 6357 - RNA, 21 nt, RNAi-antisense strand
ucgugcgcauuuggauucuuu

SEQ ID NO: 6358 - DNA, 21 bp, Homo sapiens
gaatccaaatgcgcacgagga

SEQ ID NO: 6359 - RNA, 21 nt, RNAi-sense strand
auccaaaugcgcacgaggauu

SEQ ID NO: 6360 - RNA, 21 nt, RNAi-antisense strand
uccucgugcgcauuuggauuu

SEQ ID NO: 6361 - DNA, 21 bp, Homo sapiens
gatggtaaacttatcatctgg

SEQ ID NO: 6362 - RNA, 21 nt, RNAi-sense strand
ugguaaacuuaucaucugguu

SEQ ID NO: 6363 - RNA, 21 nt, RNAi-antisense strand
ccagaugauaaguuuaccauu

SEQ ID NO: 6364 - DNA, 21 bp, Homo sapiens
gatgacaatcagatcgtcacc

SEQ ID NO: 6365 - RNA, 21 nt, RNAi-sense strand
ugacaaucagaucgucaccuu

SEQ ID NO: 6366 - RNA, 21 nt, RNAi-antisense strand
ggugacgaucugauugucauu

SEQ ID NO: 6367 - DNA, 21 bp, Homo sapiens
gacaatcagatcgtcaccagc

SEQ ID NO: 6368 - RNA, 21 nt, RNAi-sense strand
caaucagaucgucaccagcuu

SEQ ID NO: 6369 - RNA, 21 nt, RNAi-antisense strand
gcuggugacgaucugauuguu

SEQ ID NO: 6370 - DNA, 21 bp, Homo sapiens
gaccaggagctcatgacttac

SEQ ID NO: 6371 - RNA, 21 nt, RNAi-sense strand
ccaggagcucaugacuuacuu

SEQ ID NO: 6372 - RNA, 21 nt, RNAi-antisense strand
guaagucaugagcuccugguu

SEQ ID NO: 6373 - DNA, 21 bp, Homo sapiens
aaagacaaaggccagtgcttc

SEQ ID NO: 6374 - RNA, 21 nt, RNAi-sense strand
agacaaaggccagugcuucuu

SEQ ID NO: 6375 - RNA, 21 nt, RNAi-antisense strand
gaagcacuggccuuugucuuu

SEQ ID NO: 6376 - DNA, 21 bp, Homo sapiens
aagacaaaggccagtgcttct

SEQ ID NO: 6377 - RNA, 21 nt, RNAi-sense strand
gacaaaggccagugcuucuuu

SEQ ID NO: 6378 - RNA, 21 nt, RNAi-antisense strand
agaagcacuggccuuugucuu

SEQ ID NO: 6379 - DNA, 21 bp, Homo sapiens
aaaggccagtgcttctgtgac

SEQ ID NO: 6380 - RNA, 21 nt, RNAi-sense strand
aggccagugcuucugugacuu

SEQ ID NO: 6381 - RNA, 21 nt, RNAi-antisense strand
gucacagaagcacuggccuuu

SEQ ID NO: 6382 - DNA, 21 bp, Homo sapiens
aaggccagtgcttctgtgacg

SEQ ID NO: 6383 - RNA, 21 nt, RNAi-sense strand
ggccagugcuucugugacguu

SEQ ID NO: 6384 - RNA, 21 nt, RNAi-antisense strand
cgucacagaagcacuggccuu

SEQ ID NO: 6385 - DNA, 21 bp, Homo sapiens
aaaggattcacaggtcctgaa

SEQ ID NO: 6386 - RNA, 21 nt, RNAi-sense strand
aggauucacagguccugaauu

SEQ ID NO: 6387 - RNA, 21 nt, RNAi-antisense strand
uucaggaccugugaauccuuu

SEQ ID NO: 6388 - DNA, 21 bp, Homo sapiens
aaggattcacaggtcctgaag

SEQ ID NO: 6389 - RNA, 21 nt, RNAi-sense strand
ggauucacagguccugaaguu

SEQ ID NO: 6390 - RNA, 21 nt, RNAi-antisense strand
cuucaggaccugugaauccuu

SEQ ID NO: 6391 - DNA, 21 bp, Homo sapiens
aataagtggattgccaggatt

SEQ ID NO: 6392 - RNA, 21 nt, RNAi-sense strand
uaaguggauugccaggauuuu

SEQ ID NO: 6393 - RNA, 21 nt, RNAi-antisense strand
aauccuggcaauccacuuauu

SEQ ID NO: 6394 - DNA, 21 bp, Homo sapiens
aaggagaagatatagaacttg

SEQ ID NO: 6395 - RNA, 21 nt, RNAi-sense strand
ggagaagauauagaacuuguu

SEQ ID NO: 6396 - RNA, 21 nt, RNAi-antisense strand
caaguucuauaucuucuccuu

SEQ ID NO: 6397 - DNA, 21 bp, Homo sapiens
aaagagtgataggacataaag

SEQ ID NO: 6398 - RNA, 21 nt, RNAi-sense strand
agagugauaggacauaaaguu

SEQ ID NO: 6399 - RNA, 21 nt, RNAi-antisense strand
cuuuauguccuaucacucuuu

SEQ ID NO: 6400 - DNA, 21 bp, Homo sapiens
aagagtgataggacataaagg

SEQ ID NO: 6401 - RNA, 21 nt, RNAi-sense strand
gagugauaggacauaaagguu

SEQ ID NO: 6402 - RNA, 21 nt, RNAi-antisense strand
ccuuuauguccuaucacucuu

SEQ ID NO: 6403 - DNA, 21 bp, Homo sapiens
aaagatggtgttcctggcttc

SEQ ID NO: 6404 - RNA, 21 nt, RNAi-sense strand
agaugguguuccuggcuucuu

SEQ ID NO: 6405 - RNA, 21 nt, RNAi-antisense strand
gaagccaggaacaccaucuuu

SEQ ID NO: 6406 - DNA, 21 bp, Homo sapiens
aagatggtgttcctggcttcc

SEQ ID NO: 6407 - RNA, 21 nt, RNAi-sense strand
gaugguguuccuggcuuccuu

SEQ ID NO: 6408 - RNA, 21 nt, RNAi-antisense strand
ggaagccaggaacaccaucuu

SEQ ID NO: 6409 - DNA, 21 bp, Homo sapiens
aatattatgacacataccagg

SEQ ID NO: 6410 - RNA, 21 nt, RNAi-sense strand
uauuaugacacauaccagguu

SEQ ID NO: 6411 - RNA, 21 nt, RNAi-antisense strand
ccugguaugugucauaauauu

SEQ ID NO: 6412 - DNA, 21 bp, Homo sapiens
aagtcctggatcatcaaggcc

SEQ ID NO: 6413 - RNA, 21 nt, RNAi-sense strand
guccuggaucaucaaggccuu

SEQ ID NO: 6414 - RNA, 21 nt, RNAi-antisense strand
ggccuugaugauccaggacuu

SEQ ID NO: 6415 - DNA, 21 bp, Homo sapiens
aaaggagaaccaggcctcctg

SEQ ID NO: 6416 - RNA, 21 nt, RNAi-sense strand
aggagaaccaggccuccuguu

SEQ ID NO: 6417 - RNA, 21 nt, RNAi-antisense strand
caggaggccugguucuccuuu

SEQ ID NO: 6418 - DNA, 21 bp, Homo sapiens
aaggagaaccaggcctcctgt

SEQ ID NO: 6419 - RNA, 21 nt, RNAi-sense strand
ggagaaccaggccuccuguuu

SEQ ID NO: 6420 - RNA, 21 nt, RNAi-antisense strand
acaggaggccugguucuccuu

SEQ ID NO: 6421 - DNA, 21 bp, Homo sapiens
aaccaggcctcctgtgtacac

SEQ ID NO: 6422 - RNA, 21 nt, RNAi-sense strand
ccaggccuccuguguacacuu

SEQ ID NO: 6423 - RNA, 21 nt, RNAi-antisense strand
guguacacaggaggccugguu

SEQ ID NO: 6424 - DNA, 21 bp, Homo sapiens
aagacaaggcgcagctggctt

SEQ ID NO: 6425 - RNA, 21 nt, RNAi-sense strand
gacaaggcgcagcuggcuuuu

SEQ ID NO: 6426 - RNA, 21 nt, RNAi-antisense strand
aagccagcugcgccuugucuu

SEQ ID NO: 6427 - DNA, 21 bp, Homo sapiens
aaggcgcagctggcttgaaag

SEQ ID NO: 6428 - RNA, 21 nt, RNAi-sense strand
ggcgcagcuggcuugaaaguu

SEQ ID NO: 6429 - RNA, 21 nt, RNAi-antisense strand
cuuucaagccagcugcgccuu

SEQ ID NO: 6430 - DNA, 21 bp, Homo sapiens
aaatacaggtcttccaggatt

SEQ ID NO: 6431 - RNA, 21 nt, RNAi-sense strand
auacaggucuuccaggauuuu

SEQ ID NO: 6432 - RNA, 21 nt, RNAi-antisense strand
aauccuggaagaccuguauuu

SEQ ID NO: 6433 - DNA, 21 bp, Homo sapiens
aatacaggtcttccaggattt

SEQ ID NO: 6434 - RNA, 21 nt, RNAi-sense strand
uacaggucuuccaggauuuuu

SEQ ID NO: 6435 - RNA, 21 nt, RNAi-antisense strand
aaauccuggaagaccuguauu

SEQ ID NO: 6436 - DNA, 21 bp, Homo sapiens
aaaggtgaaacacttcagcct

SEQ ID NO: 6437 - RNA, 21 nt, RNAi-sense strand
aggugaaacacuucagccuuu

SEQ ID NO: 6438 - RNA, 21 nt, RNAi-antisense strand
aggcugaaguguuucaccuuu

SEQ ID NO: 6439 - DNA, 21 bp, Homo sapiens
aaggtgaaacacttcagcctg

SEQ ID NO: 6440 - RNA, 21 nt, RNAi-sense strand
ggugaaacacuucagccuguu

SEQ ID NO: 6441 - RNA, 21 nt, RNAi-antisense strand
caggcugaaguguuucaccuu

SEQ ID NO: 6442 - DNA, 21 bp, Homo sapiens
aaaggattaccaggacctaaa

SEQ ID NO: 6443 - RNA, 21 nt, RNAi-sense strand
aggauuaccaggaccuaaauu

SEQ ID NO: 6444 - RNA, 21 nt, RNAi-antisense strand
uuuagguccugguaauccuuu

SEQ ID NO: 6445 - DNA, 21 bp, Homo sapiens
aaggattaccaggacctaaag

SEQ ID NO: 6446 - RNA, 21 nt, RNAi-sense strand
ggauuaccaggaccuaaaguu

SEQ ID NO: 6447 - RNA, 21 nt, RNAi-antisense strand
cuuuagguccugguaauccuu

SEQ ID NO: 6448 - DNA, 21 bp, Homo sapiens
aaaggcgaactggctctgagt

SEQ ID NO: 6449 - RNA, 21 nt, RNAi-sense strand
aggcgaacuggcucugaguuu

SEQ ID NO: 6450 - RNA, 21 nt, RNAi-antisense strand
acucagagccaguucgccuuu

SEQ ID NO: 6451 - DNA, 21 bp, Homo sapiens
aaggcgaactggctctgagtg

SEQ ID NO: 6452 - RNA, 21 nt, RNAi-sense strand
ggcgaacuggcucugaguguu

SEQ ID NO: 6453 - RNA, 21 nt, RNAi-antisense strand
cacucagagccaguucgccuu

SEQ ID NO: 6454 - DNA, 21 bp, Homo sapiens
aactggctctgagtggtgaga

SEQ ID NO: 6455 - RNA, 21 nt, RNAi-sense strand
cuggcucugaguggugagauu

SEQ ID NO: 6456 - RNA, 21 nt, RNAi-antisense strand
ucucaccacucagagccaguu

SEQ ID NO: 6457 - DNA, 21 bp, Homo sapiens
aaggagaacctggtctccagg

SEQ ID NO: 6458 - RNA, 21 nt, RNAi-sense strand
ggagaaccuggucuccagguu

SEQ ID NO: 6459 - RNA, 21 nt, RNAi-antisense strand
ccuggagaccagguucuccuu

SEQ ID NO: 6460 - DNA, 21 bp, Homo sapiens
aaatgtggagatcctggtctt

SEQ ID NO: 6461 - RNA, 21 nt, RNAi-sense strand
auguggagauccuggucuuuu

SEQ ID NO: 6462 - RNA, 21 nt, RNAi-antisense strand
aagaccaggaucuccacauuu

SEQ ID NO: 6463 - DNA, 21 bp, Homo sapiens
aatgtggagatcctggtcttc

SEQ ID NO: 6464 - RNA, 21 nt, RNAi-sense strand
uguggagauccuggucuucuu

SEQ ID NO: 6465 - RNA, 21 nt, RNAi-antisense strand
gaagaccaggaucuccacauu

SEQ ID NO: 6466 - DNA, 21 bp, Homo sapiens
aaccaggaattccaggaattg

SEQ ID NO: 6467 - RNA, 21 nt, RNAi-sense strand
ccaggaauuccaggaauuguu

SEQ ID NO: 6468 - RNA, 21 nt, RNAi-antisense strand
caauuccuggaauuccugguu

SEQ ID NO: 6469 - DNA, 21 bp, Homo sapiens
aattccaggaattggatttcc

SEQ ID NO: 6470 - RNA, 21 nt, RNAi-sense strand
uuccaggaauuggauuuccuu

SEQ ID NO: 6471 - RNA, 21 nt, RNAi-antisense strand
ggaaauccaauuccuggaauu

SEQ ID NO: 6472 - DNA, 21 bp, Homo sapiens
aaccagcagtagccatgcctg

SEQ ID NO: 6473 - RNA, 21 nt, RNAi-sense strand
ccagcaguagccaugccuguu

SEQ ID NO: 6474 - RNA, 21 nt, RNAi-antisense strand
caggcauggcuacugcugguu

SEQ ID NO: 6475 - DNA, 21 bp, Homo sapiens
aacatggagaaattggactcc

SEQ ID NO: 6476 - RNA, 21 nt, RNAi-sense strand
cauggagaaauuggacuccuu

SEQ ID NO: 6477 - RNA, 21 nt, RNAi-antisense strand
ggaguccaauuucuccauguu

SEQ ID NO: 6478 - DNA, 21 bp, Homo sapiens
aaggacttccaggcttaaatg

SEQ ID NO: 6479 - RNA, 21 nt, RNAi-sense strand
ggacuuccaggcuuaaauguu

SEQ ID NO: 6480 - RNA, 21 nt, RNAi-antisense strand
cauuuaagccuggaaguccuu

SEQ ID NO: 6481 - DNA, 21 bp, Homo sapiens
aattccaggcttggatagatc

SEQ ID NO: 6482 - RNA, 21 nt, RNAi-sense strand
uuccaggcuuggauagaucuu

SEQ ID NO: 6483 - RNA, 21 nt, RNAi-antisense strand
gaucuauccaagccuggaauu

SEQ ID NO: 6484 - DNA, 21 bp, Homo sapiens
aaactggatcaccaggaattc

SEQ ID NO: 6485 - RNA, 21 nt, RNAi-sense strand
acuggaucaccaggaauucuu

SEQ ID NO: 6486 - RNA, 21 nt, RNAi-antisense strand
gaauuccuggugauccaguuu

SEQ ID NO: 6487 - DNA, 21 bp, Homo sapiens
aactggatcaccaggaattcc

SEQ ID NO: 6488 - RNA, 21 nt, RNAi-sense strand
cuggaucaccaggaauuccuu

SEQ ID NO: 6489 - RNA, 21 nt, RNAi-antisense strand
ggaauuccuggugauccaguu

SEQ ID NO: 6490 - DNA, 21 bp, Homo sapiens
aattccaggtcatcaaggtga

SEQ ID NO: 6491 - RNA, 21 nt, RNAi-sense strand
uuccaggucaucaaggugauu

SEQ ID NO: 6492 - RNA, 21 nt, RNAi-antisense strand
ucaccuugaugaccuggaauu

SEQ ID NO: 6493 - DNA, 21 bp, Homo sapiens
aaagaggatatccaggaaatc

SEQ ID NO: 6494 - RNA, 21 nt, RNAi-sense strand
agaggauauccaggaaaucuu

SEQ ID NO: 6495 - RNA, 21 nt, RNAi-antisense strand
gauuuccuggauauccucuuu

SEQ ID NO: 6496 - DNA, 21 bp, Homo sapiens
aagaggatatccaggaaatcc

SEQ ID NO: 6497 - RNA, 21 nt, RNAi-sense strand
gaggauauccaggaaauccuu

SEQ ID NO: 6498 - RNA, 21 nt, RNAi-antisense strand
ggauuuccuggauauccucuu

SEQ ID NO: 6499 - DNA, 21 bp, Homo sapiens
aacaaggagataaaggaaatc

SEQ ID NO: 6500 - RNA, 21 nt, RNAi-sense strand
caaggagauaaaggaaaucuu

SEQ ID NO: 6501 - RNA, 21 nt, RNAi-antisense strand
gauuuccuuuaucuccuuguu

SEQ ID NO: 6502 - DNA, 21 bp, Homo sapiens
aaaggagaaccaggtctcaaa

SEQ ID NO: 6503 - RNA, 21 nt, RNAi-sense strand
aggagaaccaggucucaaauu

SEQ ID NO: 6504 - RNA, 21 nt, RNAi-antisense strand
uuugagaccugguucuccuuu

SEQ ID NO: 6505 - DNA, 21 bp, Homo sapiens
aaggagaaccaggtctcaaag

SEQ ID NO: 6506 - RNA, 21 nt, RNAi-sense strand
ggagaaccaggucucaaaguu

SEQ ID NO: 6507 - RNA, 21 nt, RNAi-antisense strand
cuuugagaccugguucuccuu

SEQ ID NO: 6508 - DNA, 21 bp, Homo sapiens
aaccaggtctcaaaggattcg

SEQ ID NO: 6509 - RNA, 21 nt, RNAi-sense strand
ccaggucucaaaggauucguu

SEQ ID NO: 6510 - RNA, 21 nt, RNAi-antisense strand
cgaauccuuugagaccugguu

SEQ ID NO: 6511 - DNA, 21 bp, Homo sapiens
aaaggattcgcaggaaatcca

SEQ ID NO: 6512 - RNA, 21 nt, RNAi-sense strand
aggauucgcaggaaauccauu

SEQ ID NO: 6513 - RNA, 21 nt, RNAi-antisense strand
uggauuuccugcgaauccuuu

SEQ ID NO: 6514 - DNA, 21 bp, Homo sapiens
aaggattcgcaggaaatccag

SEQ ID NO: 6515 - RNA, 21 nt, RNAi-sense strand
ggauucgcaggaaauccaguu

SEQ ID NO: 6516 - RNA, 21 nt, RNAi-antisense strand
cuggauuuccugcgaauccuu

SEQ ID NO: 6517 - DNA, 21 bp, Homo sapiens
aaatccaggtgagaaaggaaa

SEQ ID NO: 6518 - RNA, 21 nt, RNAi-sense strand
auccaggugagaaaggaaauu

SEQ ID NO: 6519 - RNA, 21 nt, RNAi-antisense strand
uuuccuuucucaccuggauuu

SEQ ID NO: 6520 - DNA, 21 bp, Homo sapiens
aatccaggtgagaaaggaaac

SEQ ID NO: 6521 - RNA, 21 nt, RNAi-sense strand
uccaggugagaaaggaaacuu

SEQ ID NO: 6522 - RNA, 21 nt, RNAi-antisense strand
guuuccuuucucaccuggauu

SEQ ID NO: 6523 - DNA, 21 bp, Homo sapiens
aaaggaaacagaggcgttcca

SEQ ID NO: 6524 - RNA, 21 nt, RNAi-sense strand
aggaaacagaggcguuccauu

SEQ ID NO: 6525 - RNA, 21 nt, RNAi-antisense strand
uggaacgccucuguuuccuuu

SEQ ID NO: 6526 - DNA, 21 bp, Homo sapiens
aaggaaacagaggcgttccag

SEQ ID NO: 6527 - RNA, 21 nt, RNAi-sense strand
ggaaacagaggcguuccaguu

SEQ ID NO: 6528 - RNA, 21 nt, RNAi-antisense strand
cuggaacgccucuguuuccuu

SEQ ID NO: 6529 - DNA, 21 bp, Homo sapiens
aatcctggagaaccaggactc

SEQ ID NO: 6530 - RNA, 21 nt, RNAi-sense strand
uccuggagaaccaggacucuu

SEQ ID NO: 6531 - RNA, 21 nt, RNAi-antisense strand
gaguccugguucuccaggauu

SEQ ID NO: 6532 - DNA, 21 bp, Homo sapiens
aaccaggactccgtggtatac

SEQ ID NO: 6533 - RNA, 21 nt, RNAi-sense strand
ccaggacuccgugguauacuu

SEQ ID NO: 6534 - RNA, 21 nt, RNAi-antisense strand
guauaccacggaguccugguu

SEQ ID NO: 6535 - DNA, 21 bp, Homo sapiens
aaggtacaaggccaggaccac

SEQ ID NO: 6536 - RNA, 21 nt, RNAi-sense strand
gguacaaggccaggaccacuu

SEQ ID NO: 6537 - RNA, 21 nt, RNAi-antisense strand
gugguccuggccuuguaccuu

SEQ ID NO: 6538 - DNA, 21 bp, Homo sapiens
aagtcctggaagtcctggcct

SEQ ID NO: 6539 - RNA, 21 nt, RNAi-sense strand
guccuggaaguccuggccuuu

SEQ ID NO: 6540 - RNA, 21 nt, RNAi-antisense strand
aggccaggacuuccaggacuu

SEQ ID NO: 6541 - DNA, 21 bp, Homo sapiens
aaagccaggtcctcatggtga

SEQ ID NO: 6542 - RNA, 21 nt, RNAi-sense strand
agccagguccucauggugauu

SEQ ID NO: 6543 - RNA, 21 nt, RNAi-antisense strand
ucaccaugaggaccuggcuuu

SEQ ID NO: 6544 - DNA, 21 bp, Homo sapiens
aagccaggtcctcatggtgat

SEQ ID NO: 6545 - RNA, 21 nt, RNAi-sense strand
gccagguccucauggugauuu

SEQ ID NO: 6546 - RNA, 21 nt, RNAi-antisense strand
aucaccaugaggaccuggcuu

SEQ ID NO: 6547 - DNA, 21 bp, Homo sapiens
aaaggaatcaaaggcctcctg

SEQ ID NO: 6548 - RNA, 21 nt, RNAi-sense strand
aggaaucaaaggccuccuguu

SEQ ID NO: 6549 - RNA, 21 nt, RNAi-antisense strand
caggaggccuuugauuccuuu

SEQ ID NO: 6550 - DNA, 21 bp, Homo sapiens
aaggaatcaaaggcctcctgg

SEQ ID NO: 6551 - RNA, 21 nt, RNAi-sense strand
ggaaucaaaggccuccugguu

SEQ ID NO: 6552 - RNA, 21 nt, RNAi-antisense strand
ccaggaggccuuugauuccuu

SEQ ID NO: 6553 - DNA, 21 bp, Homo sapiens
aagaggtgaccaaggacgtga

SEQ ID NO: 6554 - RNA, 21 nt, RNAi-sense strand
gaggugaccaaggacgugauu

SEQ ID NO: 6555 - RNA, 21 nt, RNAi-antisense strand
ucacguccuuggucaccucuu

SEQ ID NO: 6556 - DNA, 21 bp, Homo sapiens
aaggacgtgatggaattcctg

SEQ ID NO: 6557 - RNA, 21 nt, RNAi-sense strand
ggacgugauggaauuccuguu

SEQ ID NO: 6558 - RNA, 21 nt, RNAi-antisense strand
caggaauuccaucacguccuu

SEQ ID NO: 6559 - DNA, 21 bp, Homo sapiens
aattcctggtccagccggaga

SEQ ID NO: 6560 - RNA, 21 nt, RNAi-sense strand
uuccugguccagccggagauu

SEQ ID NO: 6561 - RNA, 21 nt, RNAi-antisense strand
ucuccggcuggaccaggaauu

SEQ ID NO: 6562 - DNA, 21 bp, Homo sapiens
aaatcgtggtccaccaggctc

SEQ ID NO: 6563 - RNA, 21 nt, RNAi-sense strand
aucgugguccaccaggcucuu

SEQ ID NO: 6564 - RNA, 21 nt, RNAi-antisense strand
gagccugguggaccacgauuu

SEQ ID NO: 6565 - DNA, 21 bp, Homo sapiens
aatcgtggtccaccaggctca

SEQ ID NO: 6566 - RNA, 21 nt, RNAi-sense strand
ucgugguccaccaggcucauu

SEQ ID NO: 6567 - RNA, 21 nt, RNAi-antisense strand
ugagccugguggaccacgauu

SEQ ID NO: 6568 - DNA, 21 bp, Homo sapiens
aaaggtccacctggaactgca

SEQ ID NO: 6569 - RNA, 21 nt, RNAi-sense strand
agguccaccuggaacugcauu

SEQ ID NO: 6570 - RNA, 21 nt, RNAi-antisense strand
ugcaguuccagguggaccuuu

SEQ ID NO: 6571 - DNA, 21 bp, Homo sapiens
aaggtccacctggaactgcag

SEQ ID NO: 6572 - RNA, 21 nt, RNAi-sense strand
gguccaccuggaacugcaguu

SEQ ID NO: 6573 - RNA, 21 nt, RNAi-antisense strand
cugcaguuccagguggaccuu

SEQ ID NO: 6574 - DNA, 21 bp, Homo sapiens
aatcctggatttctaggatcc

SEQ ID NO: 6575 - RNA, 21 nt, RNAi-sense strand
uccuggauuucuaggauccuu

SEQ ID NO: 6576 - RNA, 21 nt, RNAi-antisense strand
ggauccuagaaauccaggauu

SEQ ID NO: 6577 - DNA, 21 bp, Homo sapiens
aaaggaccacctggtgtacgt

SEQ ID NO: 6578 - RNA, 21 nt, RNAi-sense strand
aggaccaccugguguacguuu

SEQ ID NO: 6579 - RNA, 21 nt, RNAi-antisense strand
acguacaccaggugguccuuu

SEQ ID NO: 6580 - DNA, 21 bp, Homo sapiens
aaggaccacctggtgtacgtg

SEQ ID NO: 6581 - RNA, 21 nt, RNAi-sense strand
ggaccaccugguguacguguu

SEQ ID NO: 6582 - RNA, 21 nt, RNAi-antisense strand
cacguacaccaggugguccuu

SEQ ID NO: 6583 - DNA, 21 bp, Homo sapiens
aagaggtaagccaggcaagga

SEQ ID NO: 6584 - RNA, 21 nt, RNAi-sense strand
gagguaagccaggcaaggauu

SEQ ID NO: 6585 - RNA, 21 nt, RNAi-antisense strand
uccuugccuggcuuaccucuu

SEQ ID NO: 6586 - DNA, 21 bp, Homo sapiens
aaaccaggaactcctggacca

SEQ ID NO: 6587 - RNA, 21 nt, RNAi-sense strand
accaggaacuccuggaccauu

SEQ ID NO: 6588 - RNA, 21 nt, RNAi-antisense strand
ugguccaggaguuccugguuu

SEQ ID NO: 6589 - DNA, 21 bp, Homo sapiens
aaccaggaactcctggaccag

SEQ ID NO: 6590 - RNA, 21 nt, RNAi-sense strand
ccaggaacuccuggaccaguu

SEQ ID NO: 6591 - RNA, 21 nt, RNAi-antisense strand
cugguccaggaguuccugguu

SEQ ID NO: 6592 - DNA, 21 bp, Homo sapiens
aactcctggaccagctggaga

SEQ ID NO: 6593 - RNA, 21 nt, RNAi-sense strand
cuccuggaccagcuggagauu

SEQ ID NO: 6594 - RNA, 21 nt, RNAi-antisense strand
ucuccagcugguccaggaguu

SEQ ID NO: 6595 - DNA, 21 bp, Homo sapiens
aaaggcaacaaaggttctaaa

SEQ ID NO: 6596 - RNA, 21 nt, RNAi-sense strand
aggcaacaaagguucuaaauu

SEQ ID NO: 6597 - RNA, 21 nt, RNAi-antisense strand
uuuagaaccuuuguugccuuu

SEQ ID NO: 6598 - DNA, 21 bp, Homo sapiens
aaggcaacaaaggttctaaag

SEQ ID NO: 6599 - RNA, 21 nt, RNAi-sense strand
ggcaacaaagguucuaaaguu

SEQ ID NO: 6600 - RNA, 21 nt, RNAi-antisense strand
cuuuagaaccuuuguugccuu

SEQ ID NO: 6601 - DNA, 21 bp, Homo sapiens
aacaaaggttctaaaggagag

SEQ ID NO: 6602 - RNA, 21 nt, RNAi-sense strand
caaagguucuaaaggagaguu

SEQ ID NO: 6603 - RNA, 21 nt, RNAi-antisense strand
cucuccuuuagaaccuuuguu

SEQ ID NO: 6604 - DNA, 21 bp, Homo sapiens
aaaggttctaaaggagagcca

SEQ ID NO: 6605 - RNA, 21 nt, RNAi-sense strand
agguucuaaaggagagccauu

SEQ ID NO: 6606 - RNA, 21 nt, RNAi-antisense strand
uggcucuccuuuagaaccuuu

SEQ ID NO: 6607 - DNA, 21 bp, Homo sapiens
aaggttctaaaggagagccag

SEQ ID NO: 6608 - RNA, 21 nt, RNAi-sense strand
gguucuaaaggagagccaguu

SEQ ID NO: 6609 - RNA, 21 nt, RNAi-antisense strand
cuggcucuccuuuagaaccuu

SEQ ID NO: 6610 - DNA, 21 bp, Homo sapiens
aaaggagagccaggaccagct

SEQ ID NO: 6611 - RNA, 21 nt, RNAi-sense strand
aggagagccaggaccagcuuu

SEQ ID NO: 6612 - RNA, 21 nt, RNAi-antisense strand
agcugguccuggcucuccuuu

SEQ ID NO: 6613 - DNA, 21 bp, Homo sapiens
aaggagagccaggaccagctg

SEQ ID NO: 6614 - RNA, 21 nt, RNAi-sense strand
ggagagccaggaccagcuguu

SEQ ID NO: 6615 - RNA, 21 nt, RNAi-antisense strand
cagcugguccuggcucuccuu

SEQ ID NO: 6616 - DNA, 21 bp, Homo sapiens
aaacgtggagacagtggatca

SEQ ID NO: 6617 - RNA, 21 nt, RNAi-sense strand
acguggagacaguggaucauu

SEQ ID NO: 6618 - RNA, 21 nt, RNAi-antisense strand
ugauccacugucuccacguuu

SEQ ID NO: 6619 - DNA, 21 bp, Homo sapiens
aacgtggagacagtggatcac

SEQ ID NO: 6620 - RNA, 21 nt, RNAi-sense strand
cguggagacaguggaucacuu

SEQ ID NO: 6621 - RNA, 21 nt, RNAi-antisense strand
gugauccacugucuccacguu

SEQ ID NO: 6622 - DNA, 21 bp, Homo sapiens
aacctggacaacgagaggctt

SEQ ID NO: 6623 - RNA, 21 nt, RNAi-sense strand
ccuggacaacgagaggcuuuu

SEQ ID NO: 6624 - RNA, 21 nt, RNAi-antisense strand
aagccucucguuguccagguu

SEQ ID NO: 6625 - DNA, 21 bp, Homo sapiens
aacgagaggctttgtcttcac

SEQ ID NO: 6626 - RNA, 21 nt, RNAi-sense strand
cgagaggcuuugucuucacuu

SEQ ID NO: 6627 - RNA, 21 nt, RNAi-antisense strand
gugaagacaaagccucucguu

SEQ ID NO: 6628 - DNA, 21 bp, Homo sapiens
aaaccacagcaattccttcat

SEQ ID NO: 6629 - RNA, 21 nt, RNAi-sense strand
accacagcaauuccuucauuu

SEQ ID NO: 6630 - RNA, 21 nt, RNAi-antisense strand
augaaggaauugcugugguuu

SEQ ID NO: 6631 - DNA, 21 bp, Homo sapiens
aaccacagcaattccttcatg

SEQ ID NO: 6632 - RNA, 21 nt, RNAi-sense strand
ccacagcaauuccuucauguu

SEQ ID NO: 6633 - RNA, 21 nt, RNAi-antisense strand
caugaaggaauugcugugguu

SEQ ID NO: 6634 - DNA, 21 bp, Homo sapiens
aagaccttggaactcttggca

SEQ ID NO: 6635 - RNA, 21 nt, RNAi-sense strand
gaccuuggaacucuuggcauu

SEQ ID NO: 6636 - RNA, 21 nt, RNAi-antisense strand
ugccaagaguuccaaggucuu

SEQ ID NO: 6637 - DNA, 21 bp, Homo sapiens
aactcttggcagctgcctgca

SEQ ID NO: 6638 - RNA, 21 nt, RNAi-sense strand
cucuuggcagcugccugcauu

SEQ ID NO: 6639 - RNA, 21 nt, RNAi-antisense strand
ugcaggcagcugccaagaguu

SEQ ID NO: 6640 - DNA, 21 bp, Homo sapiens
aatgccattcttattctgcaa

SEQ ID NO: 6641 - RNA, 21 nt, RNAi-sense strand
ugccauucuuauucugcaauu

SEQ ID NO: 6642 - RNA, 21 nt, RNAi-antisense strand
uugcagaauaagaauggcauu

SEQ ID NO: 6643 - DNA, 21 bp, Homo sapiens
aatgattattcatactggctg

SEQ ID NO: 6644 - RNA, 21 nt, RNAi-sense strand
ugauuauucauacuggcuguu

SEQ ID NO: 6645 - RNA, 21 nt, RNAi-antisense strand
cagccaguaugaauaaucauu

SEQ ID NO: 6646 - DNA, 21 bp, Homo sapiens
aacaccagctctgatgccaat

SEQ ID NO: 6647 - RNA, 21 nt, RNAi-sense strand
caccagcucugaugccaauuu

SEQ ID NO: 6648 - RNA, 21 nt, RNAi-antisense strand
auuggcaucagagcugguguu

SEQ ID NO: 6649 - DNA, 21 bp, Homo sapiens
aagcagatgcactgtttgtga

SEQ ID NO: 6650 - RNA, 21 nt, RNAi-sense strand
gcagaugcacuguuugugauu

SEQ ID NO: 6651 - RNA, 21 nt, RNAi-antisense strand
ucacaaacagugcaucugcuu

SEQ ID NO: 6652 - DNA, 21 bp, Homo sapiens
aaggtcctgcgatcgccatag

SEQ ID NO: 6653 - RNA, 21 nt, RNAi-sense strand
gguccugcgaucgccauaguu

SEQ ID NO: 6654 - RNA, 21 nt, RNAi-antisense strand
cuauggcgaucgcaggaccuu

SEQ ID NO: 6655 - DNA, 21 bp, Homo sapiens
aaaccactgacattcctccat

SEQ ID NO: 6656 - RNA, 21 nt, RNAi-sense strand
accacugacauuccuccauuu

SEQ ID NO: 6657 - RNA, 21 nt, RNAi-antisense strand
auggaggaaugucagugguuu

SEQ ID NO: 6658 - DNA, 21 bp, Homo sapiens
aaccactgacattcctccatg

SEQ ID NO: 6659 - RNA, 21 nt, RNAi-sense strand
ccacugacauuccuccauguu

SEQ ID NO: 6660 - RNA, 21 nt, RNAi-antisense strand
cauggaggaaugucagugguu

SEQ ID NO: 6661 - DNA, 21 bp, Homo sapiens
aatgtcatggaagaggaacgt

SEQ ID NO: 6662 - RNA, 21 nt, RNAi-sense strand
ugucauggaagaggaacguuu

SEQ ID NO: 6663 - RNA, 21 nt, RNAi-antisense strand
acguuccucuuccaugacauu

SEQ ID NO: 6664 - DNA, 21 bp, Homo sapiens
aagaggaacgtgcaactacta

SEQ ID NO: 6665 - RNA, 21 nt, RNAi-sense strand
gaggaacgugcaacuacuauu

SEQ ID NO: 6666 - RNA, 21 nt, RNAi-antisense strand
uaguaguugcacguuccucuu

SEQ ID NO: 6667 - DNA, 21 bp, Homo sapiens
aacgtgcaactactattcaaa

SEQ ID NO: 6668 - RNA, 21 nt, RNAi-sense strand
cgugcaacuacuauucaaauu

SEQ ID NO: 6669 - RNA, 21 nt, RNAi-antisense strand
uuugaauaguaguugcacguu

SEQ ID NO: 6670 - DNA, 21 bp, Homo sapiens
aaattcctacagtttctggct

SEQ ID NO: 6671 - RNA, 21 nt, RNAi-sense strand
auuccuacaguuucuggcuuu

SEQ ID NO: 6672 - RNA, 21 nt, RNAi-antisense strand
agccagaaacuguaggaauuu

SEQ ID NO: 6673 - DNA, 21 bp, Homo sapiens
aattcctacagtttctggctg

SEQ ID NO: 6674 - RNA, 21 nt, RNAi-sense strand
uuccuacaguuucuggcuguu

SEQ ID NO: 6675 - RNA, 21 nt, RNAi-antisense strand
cagccagaaacuguaggaauu

SEQ ID NO: 6676 - DNA, 21 bp, Homo sapiens
aaagaatgttcagaaagccta

SEQ ID NO: 6677 - RNA, 21 nt, RNAi-sense strand
agaauguucagaaagccuauu

SEQ ID NO: 6678 - RNA, 21 nt, RNAi-antisense strand
uaggcuuucugaacauucuuu

SEQ ID NO: 6679 - DNA, 21 bp, Homo sapiens
aagaatgttcagaaagcctat

SEQ ID NO: 6680 - RNA, 21 nt, RNAi-sense strand
gaauguucagaaagccuauuu

SEQ ID NO: 6681 - RNA, 21 nt, RNAi-antisense strand
auaggcuuucugaacauucuu

SEQ ID NO: 6682 - DNA, 21 bp, Homo sapiens
aatgttcagaaagcctattcc

SEQ ID NO: 6683 - RNA, 21 nt, RNAi-sense strand
uguucagaaagccuauuccuu

SEQ ID NO: 6684 - RNA, 21 nt, RNAi-antisense strand
ggaauaggcuuucugaacauu

SEQ ID NO: 6685 - DNA, 21 bp, Homo sapiens
aaagcctattccatcaactgt

SEQ ID NO: 6686 - RNA, 21 nt, RNAi-sense strand
agccuauuccaucaacuguuu

SEQ ID NO: 6687 - RNA, 21 nt, RNAi-antisense strand
acaguugauggaauaggcuuu

SEQ ID NO: 6688 - DNA, 21 bp, Homo sapiens
aagcctattccatcaactgtg

SEQ ID NO: 6689 - RNA, 21 nt, RNAi-sense strand
gccuauuccaucaacuguguu

SEQ ID NO: 6690 - RNA, 21 nt, RNAi-antisense strand
cacaguugauggaauaggcuu

SEQ ID NO: 6691 - DNA, 21 bp, Homo sapiens
aaataataagtcgctgtcagg

SEQ ID NO: 6692 - RNA, 21 nt, RNAi-sense strand
auaauaagucgcugucagguu

SEQ ID NO: 6693 - RNA, 21 nt, RNAi-antisense strand
ccugacagcgacuuauuauuu

SEQ ID NO: 6694 - DNA, 21 bp, Homo sapiens
aataataagtcgctgtcaggt

SEQ ID NO: 6695 - RNA, 21 nt, RNAi-sense strand
uaauaagucgcugucagguuu

SEQ ID NO: 6696 - RNA, 21 nt, RNAi-antisense strand
accugacagcgacuuauuauu

SEQ ID NO: 6697 - DNA, 21 bp, Homo sapiens
aataagtcgctgtcaggtgtg

SEQ ID NO: 6698 - RNA, 21 nt, RNAi-sense strand
uaagucgcugucagguguguu

SEQ ID NO: 6699 - RNA, 21 nt, RNAi-antisense strand
cacaccugacagcgacuuauu

SEQ ID NO: 6700 - DNA, 21 bp, Homo sapiens
aagtcgctgtcaggtgtgcat

SEQ ID NO: 6701 - RNA, 21 nt, RNAi-sense strand
gucgcugucaggugugcauuu

SEQ ID NO: 6702 - RNA, 21 nt, RNAi-antisense strand
augcacaccugacagcgacuu

SEQ ID NO: 6703 - DNA, 21 bp, Homo sapiens
aaagacatgcagaactgctat

SEQ ID NO: 6704 - RNA, 21 nt, RNAi-sense strand
agacaugcagaacugcuauuu

SEQ ID NO: 6705 - RNA, 21 nt, RNAi-antisense strand
auagcaguucugcaugucuuu

SEQ ID NO: 6706 - DNA, 21 bp, Homo sapiens
aagacatgcagaactgctatt

SEQ ID NO: 6707 - RNA, 21 nt, RNAi-sense strand
gacaugcagaacugcuauuuu

SEQ ID NO: 6708 - RNA, 21 nt, RNAi-antisense strand
aauagcaguucugcaugucuu

SEQ ID NO: 6709 - DNA, 21 bp, Homo sapiens
aaagtaatgacagaacatgct

SEQ ID NO: 6710 - RNA, 21 nt, RNAi-sense strand
aguaaugacagaacaugcuuu

SEQ ID NO: 6711 - RNA, 21 nt, RNAi-antisense strand
agcauguucugucauuacuuu

SEQ ID NO: 6712 - DNA, 21 bp, Homo sapiens
aagtaatgacagaacatgctg

SEQ ID NO: 6713 - RNA, 21 nt, RNAi-sense strand
guaaugacagaacaugcuguu

SEQ ID NO: 6714 - RNA, 21 nt, RNAi-antisense strand
cagcauguucugucauuacuu

SEQ ID NO: 6715 - DNA, 21 bp, Homo sapiens
aatgacagaacatgctgttat

SEQ ID NO: 6716 - RNA, 21 nt, RNAi-sense strand
ugacagaacaugcuguuauuu

SEQ ID NO: 6717 - RNA, 21 nt, RNAi-antisense strand
auaacagcauguucugucauu

SEQ ID NO: 6718 - DNA, 21 bp, Homo sapiens
aaccaaacaatattgctccat

SEQ ID NO: 6719 - RNA, 21 nt, RNAi-sense strand
ccaaacaauauugcuccauuu

SEQ ID NO: 6720 - RNA, 21 nt, RNAi-antisense strand
auggagcaauauuguuugguu

SEQ ID NO: 6721 - DNA, 21 bp, Homo sapiens
aaacaatattgctccatgatg

SEQ ID NO: 6722 - RNA, 21 nt, RNAi-sense strand
acaauauugcuccaugauguu

SEQ ID NO: 6723 - RNA, 21 nt, RNAi-antisense strand
caucauggagcaauauuguuu

SEQ ID NO: 6724 - DNA, 21 bp, Homo sapiens
aacaatattgctccatgatga

SEQ ID NO: 6725 - RNA, 21 nt, RNAi-sense strand
caauauugcuccaugaugauu

SEQ ID NO: 6726 - RNA, 21 nt, RNAi-antisense strand
ucaucauggagcaauauuguu

SEQ ID NO: 6727 - DNA, 21 bp, Homo sapiens
aatattgctccatgatgactt

SEQ ID NO: 6728 - RNA, 21 nt, RNAi-sense strand
uauugcuccaugaugacuuuu

SEQ ID NO: 6729 - RNA, 21 nt, RNAi-antisense strand
aagucaucauggagcaauauu

SEQ ID NO: 6730 - DNA, 21 bp, Homo sapiens
aaagcaattctttcaagtgca

SEQ ID NO: 6731 - RNA, 21 nt, RNAi-sense strand
agcaauucuuucaagugcauu

SEQ ID NO: 6732 - RNA, 21 nt, RNAi-antisense strand
ugcacuugaaagaauugcuuu

SEQ ID NO: 6733 - DNA, 21 bp, Homo sapiens
aagcaattctttcaagtgcag

SEQ ID NO: 6734 - RNA, 21 nt, RNAi-sense strand
gcaauucuuucaagugcaguu

SEQ ID NO: 6735 - RNA, 21 nt, RNAi-antisense strand
cugcacuugaaagaauugcuu

SEQ ID NO: 6736 - DNA, 21 bp, Homo sapiens
aattctttcaagtgcagttct

SEQ ID NO: 6737 - RNA, 21 nt, RNAi-sense strand
uucuuucaagugcaguucuuu

SEQ ID NO: 6738 - RNA, 21 nt, RNAi-antisense strand
agaacugcacuugaaagaauu

SEQ ID NO: 6739 - DNA, 21 bp, Homo sapiens
aagtgcagttctgtgatctgg

SEQ ID NO: 6740 - RNA, 21 nt, RNAi-sense strand
gugcaguucugugaucugguu

SEQ ID NO: 6741 - RNA, 21 nt, RNAi-antisense strand
ccagaucacagaacugcacuu

SEQ ID NO: 6742 - DNA, 21 bp, Homo sapiens
aatctgtgctgtttcaaagtt

SEQ ID NO: 6743 - RNA, 21 nt, RNAi-sense strand
ucugugcuguuucaaaguuuu

SEQ ID NO: 6744 - RNA, 21 nt, RNAi-antisense strand
aacuuugaaacagcacagauu

SEQ ID NO: 6745 - DNA, 21 bp, Homo sapiens
aaagttctctgtggcaaagca

SEQ ID NO: 6746 - RNA, 21 nt, RNAi-sense strand
aguucucuguggcaaagcauu

SEQ ID NO: 6747 - RNA, 21 nt, RNAi-antisense strand
ugcuuugccacagagaacuuu

SEQ ID NO: 6748 - DNA, 21 bp, Homo sapiens
aagttctctgtggcaaagcag

SEQ ID NO: 6749 - RNA, 21 nt, RNAi-sense strand
guucucuguggcaaagcaguu

SEQ ID NO: 6750 - RNA, 21 nt, RNAi-antisense strand
cugcuuugccacagagaacuu

SEQ ID NO: 6751 - DNA, 21 bp, Homo sapiens
aaagcagcaactattcacaaa

SEQ ID NO: 6752 - RNA, 21 nt, RNAi-sense strand
agcagcaacuauucacaaauu

SEQ ID NO: 6753 - RNA, 21 nt, RNAi-antisense strand
uuugugaauaguugcugcuuu

SEQ ID NO: 6754 - DNA, 21 bp, Homo sapiens
aaacctattccacttacatcc

SEQ ID NO: 6755 - RNA, 21 nt, RNAi-sense strand
accuauuccacuuacauccuu

SEQ ID NO: 6756 - RNA, 21 nt, RNAi-antisense strand
ggauguaaguggaauagguuu

SEQ ID NO: 6757 - DNA, 21 bp, Homo sapiens
aacctattccacttacatcca

SEQ ID NO: 6758 - RNA, 21 nt, RNAi-sense strand
ccuauuccacuuacauccauu

SEQ ID NO: 6759 - RNA, 21 nt, RNAi-antisense strand
uggauguaaguggaauagguu

SEQ ID NO: 6760 - DNA, 21 bp, Homo sapiens
aaggcactgtcactacggtga

SEQ ID NO: 6761 - RNA, 21 nt, RNAi-sense strand
ggcacugucacuacggugauu

SEQ ID NO: 6762 - RNA, 21 nt, RNAi-antisense strand
ucaccguagugacagugccuu

SEQ ID NO: 6763 - DNA, 21 bp, Homo sapiens
aagtttgaatgctgcacgtta

SEQ ID NO: 6764 - RNA, 21 nt, RNAi-sense strand
guuugaaugcugcacguuauu

SEQ ID NO: 6765 - RNA, 21 nt, RNAi-antisense strand
uaacgugcagcauucaaacuu

SEQ ID NO: 6766 - DNA, 21 bp, Homo sapiens
aatgctgcacgttatgaaata

SEQ ID NO: 6767 - RNA, 21 nt, RNAi-sense strand
ugcugcacguuaugaaauauu

SEQ ID NO: 6768 - RNA, 21 nt, RNAi-antisense strand
uauuucauaacgugcagcauu

SEQ ID NO: 6769 - DNA, 21 bp, Homo sapiens
aaggcctgatggaacacagaa

SEQ ID NO: 6770 - RNA, 21 nt, RNAi-sense strand
ggccugauggaacacagaauu

SEQ ID NO: 6771 - RNA, 21 nt, RNAi-antisense strand
uucuguguuccaucaggccuu

SEQ ID NO: 6772 - DNA, 21 bp, Homo sapiens
aacacagaactgaactgaggt

SEQ ID NO: 6773 - RNA, 21 nt, RNAi-sense strand
cacagaacugaacugagguuu

SEQ ID NO: 6774 - RNA, 21 nt, RNAi-antisense strand
accucaguucaguucuguguu

SEQ ID NO: 6775 - DNA, 21 bp, Homo sapiens
aactgaactgaggttcatgga

SEQ ID NO: 6776 - RNA, 21 nt, RNAi-sense strand
cugaacugagguucauggauu

SEQ ID NO: 6777 - RNA, 21 nt, RNAi-antisense strand
uccaugaaccucaguucaguu

SEQ ID NO: 6778 - DNA, 21 bp, Homo sapiens
aattcattcactgtagctcta

SEQ ID NO: 6779 - RNA, 21 nt, RNAi-sense strand
uucauucacuguagcucuauu

SEQ ID NO: 6780 - RNA, 21 nt, RNAi-antisense strand
uagagcuacagugaaugaauu

SEQ ID NO: 6781 - DNA, 21 bp, Homo sapiens
aaatctgcttgtatccaagca

SEQ ID NO: 6782 - RNA, 21 nt, RNAi-sense strand
aucugcuuguauccaagcauu

SEQ ID NO: 6783 - RNA, 21 nt, RNAi-antisense strand
ugcuuggauacaagcagauuu

SEQ ID NO: 6784 - DNA, 21 bp, Homo sapiens
aatctgcttgtatccaagcat

SEQ ID NO: 6785 - RNA, 21 nt, RNAi-sense strand
ucugcuuguauccaagcauuu

SEQ ID NO: 6786 - RNA, 21 nt, RNAi-antisense strand
augcuuggauacaagcagauu

SEQ ID NO: 6787 - DNA, 21 bp, Homo sapiens
aaatgtgcactttatcctcat

SEQ ID NO: 6788 - RNA, 21 nt, RNAi-sense strand
augugcacuuuauccucauuu

SEQ ID NO: 6789 - RNA, 21 nt, RNAi-antisense strand
augaggauaaagugcacauuu

SEQ ID NO: 6790 - DNA, 21 bp, Homo sapiens
aatgtgcactttatcctcatt

SEQ ID NO: 6791 - RNA, 21 nt, RNAi-sense strand
ugugcacuuuauccucauuuu

SEQ ID NO: 6792 - RNA, 21 nt, RNAi-antisense strand
aaugaggauaaagugcacauu

SEQ ID NO: 6793 - DNA, 21 bp, Homo sapiens
aaatgttggtgcataccttat

SEQ ID NO: 6794 - RNA, 21 nt, RNAi-sense strand
auguuggugcauaccuuauuu

SEQ ID NO: 6795 - RNA, 21 nt, RNAi-antisense strand
auaagguaugcaccaacauuu

SEQ ID NO: 6796 - DNA, 21 bp, Homo sapiens
aatgttggtgcataccttatg

SEQ ID NO: 6797 - RNA, 21 nt, RNAi-sense strand
uguuggugcauaccuuauguu

SEQ ID NO: 6798 - RNA, 21 nt, RNAi-antisense strand
cauaagguaugcaccaacauu

SEQ ID NO: 6799 - DNA, 21 bp, Homo sapiens
aatccatgaaagaacttaagg

SEQ ID NO: 6800 - RNA, 21 nt, RNAi-sense strand
uccaugaaagaacuuaagguu

SEQ ID NO: 6801 - RNA, 21 nt, RNAi-antisense strand
ccuuaaguucuuucauggauu

SEQ ID NO: 6802 - DNA, 21 bp, Homo sapiens
aagaacttaaggcatttgttg

SEQ ID NO: 6803 - RNA, 21 nt, RNAi-sense strand
gaacuuaaggcauuuguuguu

SEQ ID NO: 6804 - RNA, 21 nt, RNAi-antisense strand
caacaaaugccuuaaguucuu

SEQ ID NO: 6805 - DNA, 21 bp, Homo sapiens
aacttaaggcatttgttggtt

SEQ ID NO: 6806 - RNA, 21 nt, RNAi-sense strand
cuuaaggcauuuguugguuuu

SEQ ID NO: 6807 - RNA, 21 nt, RNAi-antisense strand
aaccaacaaaugccuuaaguu

SEQ ID NO: 6808 - DNA, 21 bp, Homo sapiens
aaggcatttgttggtttatca

SEQ ID NO: 6809 - RNA, 21 nt, RNAi-sense strand
ggcauuuguugguuuaucauu

SEQ ID NO: 6810 - RNA, 21 nt, RNAi-antisense strand
ugauaaaccaacaaaugccuu

SEQ ID NO: 6811 - DNA, 21 bp, Homo sapiens
aatatgtcatcactctaggtt

SEQ ID NO: 6812 - RNA, 21 nt, RNAi-sense strand
uaugucaucacucuagguuuu

SEQ ID NO: 6813 - RNA, 21 nt, RNAi-antisense strand
aaccuagagugaugacauauu

SEQ ID NO: 6814 - DNA, 21 bp, Homo sapiens
aaaccatactgaaagagtcat

SEQ ID NO: 6815 - RNA, 21 nt, RNAi-sense strand
accauacugaaagagucauuu

SEQ ID NO: 6816 - RNA, 21 nt, RNAi-antisense strand
augacucuuucaguaugguuu

SEQ ID NO: 6817 - DNA, 21 bp, Homo sapiens
aaccatactgaaagagtcatt

SEQ ID NO: 6818 - RNA, 21 nt, RNAi-sense strand
ccauacugaaagagucauuuu

SEQ ID NO: 6819 - RNA, 21 nt, RNAi-antisense strand
aaugacucuuucaguaugguu

SEQ ID NO: 6820 - DNA, 21 bp, Homo sapiens
aaactgtataacttggccgct

SEQ ID NO: 6821 - RNA, 21 nt, RNAi-sense strand
acuguauaacuuggccgcuuu

SEQ ID NO: 6822 - RNA, 21 nt, RNAi-antisense strand
agcggccaaguuauacaguuu

SEQ ID NO: 6823 - DNA, 21 bp, Homo sapiens
aactgtataacttggccgctg

SEQ ID NO: 6824 - RNA, 21 nt, RNAi-sense strand
cuguauaacuuggccgcuguu

SEQ ID NO: 6825 - RNA, 21 nt, RNAi-antisense strand
cagcggccaaguuauacaguu

SEQ ID NO: 6826 - DNA, 21 bp, Homo sapiens
aacttggccgctgtatgtctt

SEQ ID NO: 6827 - RNA, 21 nt, RNAi-sense strand
cuuggccgcuguaugucuuuu

SEQ ID NO: 6828 - RNA, 21 nt, RNAi-antisense strand
aagacauacagcggccaaguu

SEQ ID NO: 6829 - DNA, 21 bp, Homo sapiens
aactatcatgttattcagcac

SEQ ID NO: 6830 - RNA, 21 nt, RNAi-sense strand
cuaucauguuauucagcacuu

SEQ ID NO: 6831 - RNA, 21 nt, RNAi-antisense strand
gugcugaauaacaugauaguu

SEQ ID NO: 6832 - DNA, 21 bp, Homo sapiens
aagcatgtccaggcactgtac

SEQ ID NO: 6833 - RNA, 21 nt, RNAi-sense strand
gcauguccaggcacuguacuu

SEQ ID NO: 6834 - RNA, 21 nt, RNAi-antisense strand
guacagugccuggacaugcuu

SEQ ID NO: 6835 - DNA, 21 bp, Homo sapiens
aacctacagagatgctaagag

SEQ ID NO: 6836 - RNA, 21 nt, RNAi-sense strand
ccuacagagaugcuaagaguu

SEQ ID NO: 6837 - RNA, 21 nt, RNAi-antisense strand
cucuuagcaucucuguagguu

SEQ ID NO: 6838 - DNA, 21 bp, Homo sapiens
aaagtaactcattgctctgta

SEQ ID NO: 6839 - RNA, 21 nt, RNAi-sense strand
aguaacucauugcucuguauu

SEQ ID NO: 6840 - RNA, 21 nt, RNAi-antisense strand
uacagagcaaugaguuacuuu

SEQ ID NO: 6841 - DNA, 21 bp, Homo sapiens
aagtaactcattgctctgtaa

SEQ ID NO: 6842 - RNA, 21 nt, RNAi-sense strand
guaacucauugcucuguaauu

SEQ ID NO: 6843 - RNA, 21 nt, RNAi-antisense strand
uuacagagcaaugaguuacuu

SEQ ID NO: 6844 - DNA, 21 bp, Homo sapiens
aatctcacatatacagtagct

SEQ ID NO: 6845 - RNA, 21 nt, RNAi-sense strand
ucucacauauacaguagcuuu

SEQ ID NO: 6846 - RNA, 21 nt, RNAi-antisense strand
agcuacuguauaugugagauu

SEQ ID NO: 6847 - DNA, 21 bp, Homo sapiens
aattcagcaggccagtaaggt

SEQ ID NO: 6848 - RNA, 21 nt, RNAi-sense strand
uucagcaggccaguaagguuu

SEQ ID NO: 6849 - RNA, 21 nt, RNAi-antisense strand
accuuacuggccugcugaauu

SEQ ID NO: 6850 - DNA, 21 bp, Homo sapiens
aaactcaggcttctagtttct

SEQ ID NO: 6851 - RNA, 21 nt, RNAi-sense strand
acucaggcuucuaguuucuuu

SEQ ID NO: 6852 - RNA, 21 nt, RNAi-antisense strand
agaaacuagaagccugaguuu

SEQ ID NO: 6853 - DNA, 21 bp, Homo sapiens
aactcaggcttctagtttctc

SEQ ID NO: 6854 - RNA, 21 nt, RNAi-sense strand
cucaggcuucuaguuucucuu

SEQ ID NO: 6855 - RNA, 21 nt, RNAi-antisense strand
gagaaacuagaagccugaguu

SEQ ID NO: 6856 - DNA, 21 bp, Homo sapiens
aaagctaagagaagataaggt

SEQ ID NO: 6857 - RNA, 21 nt, RNAi-sense strand
agcuaagagaagauaagguuu

SEQ ID NO: 6858 - RNA, 21 nt, RNAi-antisense strand
accuuaucuucucuuagcuuu

SEQ ID NO: 6859 - DNA, 21 bp, Homo sapiens
aagctaagagaagataaggtc

SEQ ID NO: 6860 - RNA, 21 nt, RNAi-sense strand
gcuaagagaagauaaggucuu

SEQ ID NO: 6861 - RNA, 21 nt, RNAi-antisense strand
gaccuuaucuucucuuagcuu

SEQ ID NO: 6862 - DNA, 21 bp, Homo sapiens
aagagaagataaggtctgaat

SEQ ID NO: 6863 - RNA, 21 nt, RNAi-sense strand
gagaagauaaggucugaauuu

SEQ ID NO: 6864 - RNA, 21 nt, RNAi-antisense strand
auucagaccuuaucuucucuu

SEQ ID NO: 6865 - DNA, 21 bp, Homo sapiens
aaggtctgaataatagcagaa

SEQ ID NO: 6866 - RNA, 21 nt, RNAi-sense strand
ggucugaauaauagcagaauu

SEQ ID NO: 6867 - RNA, 21 nt, RNAi-antisense strand
uucugcuauuauucagaccuu

SEQ ID NO: 6868 - DNA, 21 bp, Homo sapiens
aactagtgttataccttgatg

SEQ ID NO: 6869 - RNA, 21 nt, RNAi-sense strand
cuaguguuauaccuugauguu

SEQ ID NO: 6870 - RNA, 21 nt, RNAi-antisense strand
caucaagguauaacacuaguu

SEQ ID NO: 6871 - DNA, 21 bp, Homo sapiens
aacactattgatgagtcttag

SEQ ID NO: 6872 - RNA, 21 nt, RNAi-sense strand
cacuauugaugagucuuaguu

SEQ ID NO: 6873 - RNA, 21 nt, RNAi-antisense strand
cuaagacucaucaauaguguu

SEQ ID NO: 6874 - DNA, 21 bp, Homo sapiens
aaagagacaaagctttgaaga

SEQ ID NO: 6875 - RNA, 21 nt, RNAi-sense strand
agagacaaagcuuugaagauu

SEQ ID NO: 6876 - RNA, 21 nt, RNAi-antisense strand
ucuucaaagcuuugucucuuu

SEQ ID NO: 6877 - DNA, 21 bp, Homo sapiens
aagagacaaagctttgaagat

SEQ ID NO: 6878 - RNA, 21 nt, RNAi-sense strand
gagacaaagcuuugaagauuu

SEQ ID NO: 6879 - RNA, 21 nt, RNAi-antisense strand
aucuucaaagcuuugucucuu

SEQ ID NO: 6880 - DNA, 21 bp, Homo sapiens
aaattcaggctactgcttcaa

SEQ ID NO: 6881 - RNA, 21 nt, RNAi-sense strand
auucaggcuacugcuucaauu

SEQ ID NO: 6882 - RNA, 21 nt, RNAi-antisense strand
uugaagcaguagccugaauuu

SEQ ID NO: 6883 - DNA, 21 bp, Homo sapiens
aattcaggctactgcttcaat

SEQ ID NO: 6884 - RNA, 21 nt, RNAi-sense strand
uucaggcuacugcuucaauuu

SEQ ID NO: 6885 - RNA, 21 nt, RNAi-antisense strand
auugaagcaguagccugaauu

SEQ ID NO: 6886 - DNA, 21 bp, Homo sapiens
aaactaagatgtgcagcattt

SEQ ID NO: 6887 - RNA, 21 nt, RNAi-sense strand
acuaagaugugcagcauuuuu

SEQ ID NO: 6888 - RNA, 21 nt, RNAi-antisense strand
aaaugcugcacaucuuaguuu

SEQ ID NO: 6889 - DNA, 21 bp, Homo sapiens
aactaagatgtgcagcatttc

SEQ ID NO: 6890 - RNA, 21 nt, RNAi-sense strand
cuaagaugugcagcauuucuu

SEQ ID NO: 6891 - RNA, 21 nt, RNAi-antisense strand
gaaaugcugcacaucuuaguu

SEQ ID NO: 6892 - DNA, 21 bp, Homo sapiens
aagatgtgcagcatttcactt

SEQ ID NO: 6893 - RNA, 21 nt, RNAi-sense strand
gaugugcagcauuucacuuuu

SEQ ID NO: 6894 - RNA, 21 nt, RNAi-antisense strand
aagugaaaugcugcacaucuu

SEQ ID NO: 6895 - DNA, 21 bp, Homo sapiens
aaggtactatagcggatatag

SEQ ID NO: 6896 - RNA, 21 nt, RNAi-sense strand
gguacuauagcggauauaguu

SEQ ID NO: 6897 - RNA, 21 nt, RNAi-antisense strand
cuauauccgcuauaguaccuu

SEQ ID NO: 6898 - DNA, 21 bp, Homo sapiens
aaagtgtggtctctggaagag

SEQ ID NO: 6899 - RNA, 21 nt, RNAi-sense strand
aguguggucucuggaagaguu

SEQ ID NO: 6900 - RNA, 21 nt, RNAi-antisense strand
cucuuccagagaccacacuuu

SEQ ID NO: 6901 - DNA, 21 bp, Homo sapiens
aagtgtggtctctggaagagc

SEQ ID NO: 6902 - RNA, 21 nt, RNAi-sense strand
guguggucucuggaagagcuu

SEQ ID NO: 6903 - RNA, 21 nt, RNAi-antisense strand
gcucuuccagagaccacacuu

SEQ ID NO: 6904 - DNA, 21 bp, Homo sapiens
aagagcagtatcagcatcatc

SEQ ID NO: 6905 - RNA, 21 nt, RNAi-sense strand
gagcaguaucagcaucaucuu

SEQ ID NO: 6906 - RNA, 21 nt, RNAi-antisense strand
gaugaugcugauacugcucuu

SEQ ID NO: 6907 - DNA, 21 bp, Homo sapiens
aacttgtcacagatgcagatt

SEQ ID NO: 6908 - RNA, 21 nt, RNAi-sense strand
cuugucacagaugcagauuuu

SEQ ID NO: 6909 - RNA, 21 nt, RNAi-antisense strand
aaucugcaucugugacaaguu

SEQ ID NO: 6910 - DNA, 21 bp, Homo sapiens
aaacctgttctatcaatccaa

SEQ ID NO: 6911 - RNA, 21 nt, RNAi-sense strand
accuguucuaucaauccaauu

SEQ ID NO: 6912 - RNA, 21 nt, RNAi-antisense strand
uuggauugauagaacagguuu

SEQ ID NO: 6913 - DNA, 21 bp, Homo sapiens
aacctgttctatcaatccaag

SEQ ID NO: 6914 - RNA, 21 nt, RNAi-sense strand
ccuguucuaucaauccaaguu

SEQ ID NO: 6915 - RNA, 21 nt, RNAi-antisense strand
cuuggauugauagaacagguu

SEQ ID NO: 6916 - DNA, 21 bp, Homo sapiens
aatccaagcacactccgcagg

SEQ ID NO: 6917 - RNA, 21 nt, RNAi-sense strand
uccaagcacacuccgcagguu

SEQ ID NO: 6918 - RNA, 21 nt, RNAi-antisense strand
ccugcggagugugcuuggauu

SEQ ID NO: 6919 - DNA, 21 bp, Homo sapiens
aagcacactccgcaggcagtt

SEQ ID NO: 6920 - RNA, 21 nt, RNAi-sense strand
gcacacuccgcaggcaguuuu

SEQ ID NO: 6921 - RNA, 21 nt, RNAi-antisense strand
aacugccugcggagugugcuu

SEQ ID NO: 6922 - DNA, 21 bp, Homo sapiens
aactgctccatccgtgcctct

SEQ ID NO: 6923 - RNA, 21 nt, RNAi-sense strand
cugcuccauccgugccucuuu

SEQ ID NO: 6924 - RNA, 21 nt, RNAi-antisense strand
agaggcacggauggagcaguu

SEQ ID NO: 6925 - DNA, 21 bp, Homo sapiens
aaagttcaaactcacaggtga

SEQ ID NO: 6926 - RNA, 21 nt, RNAi-sense strand
aguucaaacucacaggugauu

SEQ ID NO: 6927 - RNA, 21 nt, RNAi-antisense strand
ucaccugugaguuugaacuuu

SEQ ID NO: 6928 - DNA, 21 bp, Homo sapiens
aagttcaaactcacaggtgac

SEQ ID NO: 6929 - RNA, 21 nt, RNAi-sense strand
guucaaacucacaggugacuu

SEQ ID NO: 6930 - RNA, 21 nt, RNAi-antisense strand
gucaccugugaguuugaacuu

SEQ ID NO: 6931 - DNA, 21 bp, Homo sapiens
aaactcacaggtgactctaag

SEQ ID NO: 6932 - RNA, 21 nt, RNAi-sense strand
acucacaggugacucuaaguu

SEQ ID NO: 6933 - RNA, 21 nt, RNAi-antisense strand
cuuagagucaccugugaguuu

SEQ ID NO: 6934 - DNA, 21 bp, Homo sapiens
aactcacaggtgactctaagg

SEQ ID NO: 6935 - RNA, 21 nt, RNAi-sense strand
cucacaggugacucuaagguu

SEQ ID NO: 6936 - RNA, 21 nt, RNAi-antisense strand
ccuuagagucaccugugaguu

SEQ ID NO: 6937 - DNA, 21 bp, Homo sapiens
aatgtcaaaccactggcctcc

SEQ ID NO: 6938 - RNA, 21 nt, RNAi-sense strand
ugucaaaccacuggccuccuu

SEQ ID NO: 6939 - RNA, 21 nt, RNAi-antisense strand
ggaggccagugguuugacauu

SEQ ID NO: 6940 - DNA, 21 bp, Homo sapiens
aaaccactggcctccactcag

SEQ ID NO: 6941 - RNA, 21 nt, RNAi-sense strand
accacuggccuccacucaguu

SEQ ID NO: 6942 - RNA, 21 nt, RNAi-antisense strand
cugaguggaggccagugguuu

SEQ ID NO: 6943 - DNA, 21 bp, Homo sapiens
aaccactggcctccactcagg

SEQ ID NO: 6944 - RNA, 21 nt, RNAi-sense strand
ccacuggccuccacucagguu

SEQ ID NO: 6945 - RNA, 21 nt, RNAi-antisense strand
ccugaguggaggccagugguu

SEQ ID NO: 6946 - DNA, 21 bp, Homo sapiens
aacttctgaggaagacaagtg

SEQ ID NO: 6947 - RNA, 21 nt, RNAi-sense strand
cuucugaggaagacaaguguu

SEQ ID NO: 6948 - RNA, 21 nt, RNAi-antisense strand
cacuugucuuccucagaaguu

SEQ ID NO: 6949 - DNA, 21 bp, Homo sapiens
aaacctgaattccaatgaagc

SEQ ID NO: 6950 - RNA, 21 nt, RNAi-sense strand
accugaauuccaaugaagcuu

SEQ ID NO: 6951 - RNA, 21 nt, RNAi-antisense strand
gcuucauuggaauucagguuu

SEQ ID NO: 6952 - DNA, 21 bp, Homo sapiens
aacctgaattccaatgaagcc

SEQ ID NO: 6953 - RNA, 21 nt, RNAi-sense strand
ccugaauuccaaugaagccuu

SEQ ID NO: 6954 - RNA, 21 nt, RNAi-antisense strand
ggcuucauuggaauucagguu

SEQ ID NO: 6955 - DNA, 21 bp, Homo sapiens
aattccaatgaagccatatga

SEQ ID NO: 6956 - RNA, 21 nt, RNAi-sense strand
uuccaaugaagccauaugauu

SEQ ID NO: 6957 - RNA, 21 nt, RNAi-antisense strand
ucauauggcuucauuggaauu

SEQ ID NO: 6958 - DNA, 21 bp, Homo sapiens
aatgaagccatatgaaccagc

SEQ ID NO: 6959 - RNA, 21 nt, RNAi-sense strand
ugaagccauaugaaccagcuu

SEQ ID NO: 6960 - RNA, 21 nt, RNAi-antisense strand
gcugguucauauggcuucauu

SEQ ID NO: 6961 - DNA, 21 bp, Homo sapiens
aagccatatgaaccagctgtc

SEQ ID NO: 6962 - RNA, 21 nt, RNAi-sense strand
gccauaugaaccagcugucuu

SEQ ID NO: 6963 - RNA, 21 nt, RNAi-antisense strand
gacagcugguucauauggcuu

SEQ ID NO: 6964 - DNA, 21 bp, Homo sapiens
aaccagctgtcagttgcactt

SEQ ID NO: 6965 - RNA, 21 nt, RNAi-sense strand
ccagcugucaguugcacuuuu

SEQ ID NO: 6966 - RNA, 21 nt, RNAi-antisense strand
aagugcaacugacagcugguu

SEQ ID NO: 6967 - DNA, 21 bp, Homo sapiens
aagtcttcagcaagataaaca

SEQ ID NO: 6968 - RNA, 21 nt, RNAi-sense strand
gucuucagcaagauaaacauu

SEQ ID NO: 6969 - RNA, 21 nt, RNAi-antisense strand
uguuuaucuugcugaagacuu

SEQ ID NO: 6970 - DNA, 21 bp, Homo sapiens
aacttgatggctaacttacta

SEQ ID NO: 6971 - RNA, 21 nt, RNAi-sense strand
cuugauggcuaacuuacuauu

SEQ ID NO: 6972 - RNA, 21 nt, RNAi-antisense strand
uaguaaguuagccaucaaguu

SEQ ID NO: 6973 - DNA, 21 bp, Homo sapiens
aaatgtaacttactgcgacta

SEQ ID NO: 6974 - RNA, 21 nt, RNAi-sense strand
auguaacuuacugcgacuauu

SEQ ID NO: 6975 - RNA, 21 nt, RNAi-antisense strand
uagucgcaguaaguuacauuu

SEQ ID NO: 6976 - DNA, 21 bp, Homo sapiens
aatgtaacttactgcgactaa

SEQ ID NO: 6977 - RNA, 21 nt, RNAi-sense strand
uguaacuuacugcgacuaauu

SEQ ID NO: 6978 - RNA, 21 nt, RNAi-antisense strand
uuagucgcaguaaguuacauu

SEQ ID NO: 6979 - DNA, 21 bp, Homo sapiens
aacttactgcgactaaactta

SEQ ID NO: 6980 - RNA, 21 nt, RNAi-sense strand
cuuacugcgacuaaacuuauu

SEQ ID NO: 6981 - RNA, 21 nt, RNAi-antisense strand
uaaguuuagucgcaguaaguu

SEQ ID NO: 6982 - DNA, 21 bp, Homo sapiens
caaaggccagtgcttctgtga

SEQ ID NO: 6983 - RNA, 21 nt, RNAi-sense strand
aaggccagugcuucugugauu

SEQ ID NO: 6984 - RNA, 21 nt, RNAi-antisense strand
ucacagaagcacuggccuuuu

SEQ ID NO: 6985 - DNA, 21 bp, Homo sapiens
cagaaaggattcacaggtcct

SEQ ID NO: 6986 - RNA, 21 nt, RNAi-sense strand
gaaaggauucacagguccuuu

SEQ ID NO: 6987 - RNA, 21 nt, RNAi-antisense strand
aggaccugugaauccuuucuu

SEQ ID NO: 6988 - DNA, 21 bp, Homo sapiens
cacaggtcctgaaggcttgcc

SEQ ID NO: 6989 - RNA, 21 nt, RNAi-sense strand
cagguccugaaggcuugccuu

SEQ ID NO: 6990 - RNA, 21 nt, RNAi-antisense strand
ggcaagccuucaggaccuguu

SEQ ID NO: 6991 - DNA, 21 bp, Homo sapiens
caggtcctgaaggcttgcctg

SEQ ID NO: 6992 - RNA, 21 nt, RNAi-sense strand
gguccugaaggcuugccuguu

SEQ ID NO: 6993 - RNA, 21 nt, RNAi-antisense strand
caggcaagccuucaggaccuu

SEQ ID NO: 6994 - DNA, 21 bp, Homo sapiens
caggacttccaggactcacgg

SEQ ID NO: 6995 - RNA, 21 nt, RNAi-sense strand
ggacuuccaggacucacgguu

SEQ ID NO: 6996 - RNA, 21 nt, RNAi-antisense strand
ccgugaguccuggaaguccuu

SEQ ID NO: 6997 - DNA, 21 bp, Homo sapiens
caggatgcagtggttctaagg

SEQ ID NO: 6998 - RNA, 21 nt, RNAi-sense strand
ggaugcagugguucuaagguu

SEQ ID NO: 6999 - RNA, 21 nt, RNAi-antisense strand
ccuuagaaccacugcauccuu

SEQ ID NO: 7000 - DNA, 21 bp, Homo sapiens
caccaggaacagttattgtga

SEQ ID NO: 7001 - RNA, 21 nt, RNAi-sense strand
ccaggaacaguuauugugauu

SEQ ID NO: 7002 - RNA, 21 nt, RNAi-antisense strand
ucacaauaacuguuccugguu

SEQ ID NO: 7003 - DNA, 21 bp, Homo sapiens
cagataacagaacggacctca

SEQ ID NO: 7004 - RNA, 21 nt, RNAi-sense strand
gauaacagaacggaccucauu

SEQ ID NO: 7005 - RNA, 21 nt, RNAi-antisense strand
ugagguccguucuguuaucuu

SEQ ID NO: 7006 - DNA, 21 bp, Homo sapiens
caggactgcctggagaatcat

SEQ ID NO: 7007 - RNA, 21 nt, RNAi-sense strand
ggacugccuggagaaucauuu

SEQ ID NO: 7008 - RNA, 21 nt, RNAi-antisense strand
augauucuccaggcaguccuu

SEQ ID NO: 7009 - DNA, 21 bp, Homo sapiens
caggatttcgtggtccaacag

SEQ ID NO: 7010 - RNA, 21 nt, RNAi-sense strand
ggauuucgugguccaacaguu

SEQ ID NO: 7011 - RNA, 21 nt, RNAi-antisense strand
cuguuggaccacgaaauccuu

SEQ ID NO: 7012 - DNA, 21 bp, Homo sapiens
cagaatattatgacacatacc

SEQ ID NO: 7013 - RNA, 21 nt, RNAi-sense strand
gaauauuaugacacauaccuu

SEQ ID NO: 7014 - RNA, 21 nt, RNAi-antisense strand
gguaugugucauaauauucuu

SEQ ID NO: 7015 - DNA, 21 bp, Homo sapiens
catcaaggcctggcctcagag

SEQ ID NO: 7016 - RNA, 21 nt, RNAi-sense strand
ucaaggccuggccucagaguu

SEQ ID NO: 7017 - RNA, 21 nt, RNAi-antisense strand
cucugaggccaggccuugauu

SEQ ID NO: 7018 - DNA, 21 bp, Homo sapiens
caggcttgaaaggaagtaaag

SEQ ID NO: 7019 - RNA, 21 nt, RNAi-sense strand
ggcuugaaaggaaguaaaguu

SEQ ID NO: 7020 - RNA, 21 nt, RNAi-antisense strand
cuuuacuuccuuucaagccuu

SEQ ID NO: 7021 - DNA, 21 bp, Homo sapiens
caggttgtgctggttcaccag

SEQ ID NO: 7022 - RNA, 21 nt, RNAi-sense strand
gguugugcugguucaccaguu

SEQ ID NO: 7023 - RNA, 21 nt, RNAi-antisense strand
cuggugaaccagcacaaccuu

SEQ ID NO: 7024 - DNA, 21 bp, Homo sapiens
caccaggtcttccaggatcac

SEQ ID NO: 7025 - RNA, 21 nt, RNAi-sense strand
ccaggucuuccaggaucacuu

SEQ ID NO: 7026 - RNA, 21 nt, RNAi-antisense strand
gugauccuggaagaccugguu

SEQ ID NO: 7027 - DNA, 21 bp, Homo sapiens
caggtcttccaggatcaccgg

SEQ ID NO: 7028 - RNA, 21 nt, RNAi-sense strand
ggucuuccaggaucaccgguu

SEQ ID NO: 7029 - RNA, 21 nt, RNAi-antisense strand
ccggugauccuggaagaccuu

SEQ ID NO: 7030 - DNA, 21 bp, Homo sapiens
cacctggagatcacggactgc

SEQ ID NO: 7031 - RNA, 21 nt, RNAi-sense strand
ccuggagaucacggacugcuu

SEQ ID NO: 7032 - RNA, 21 nt, RNAi-antisense strand
gcaguccgugaucuccagguu

SEQ ID NO: 7033 - DNA, 21 bp, Homo sapiens
cacggactgccaggctatcta

SEQ ID NO: 7034 - RNA, 21 nt, RNAi-sense strand
cggacugccaggcuaucuauu

SEQ ID NO: 7035 - RNA, 21 nt, RNAi-antisense strand
uagauagccuggcaguccguu

SEQ ID NO: 7036 - DNA, 21 bp, Homo sapiens
caaaggagaaccaggcctcct

SEQ ID NO: 7037 - RNA, 21 nt, RNAi-sense strand
aaggagaaccaggccuccuuu

SEQ ID NO: 7038 - RNA, 21 nt, RNAi-antisense strand
aggaggccugguucuccuuuu

SEQ ID NO: 7039 - DNA, 21 bp, Homo sapiens
caggcctcctgtgtacacagt

SEQ ID NO: 7040 - RNA, 21 nt, RNAi-sense strand
ggccuccuguguacacaguuu

SEQ ID NO: 7041 - RNA, 21 nt, RNAi-antisense strand
acuguguacacaggaggccuu

SEQ ID NO: 7042 - DNA, 21 bp, Homo sapiens
caggaagacaaggcgcagctg

SEQ ID NO: 7043 - RNA, 21 nt, RNAi-sense strand
ggaagacaaggcgcagcuguu

SEQ ID NO: 7044 - RNA, 21 nt, RNAi-antisense strand
cagcugcgccuugucuuccuu

SEQ ID NO: 7045 - DNA, 21 bp, Homo sapiens
caaggcgcagctggcttgaaa

SEQ ID NO: 7046 - RNA, 21 nt, RNAi-sense strand
aggcgcagcuggcuugaaauu

SEQ ID NO: 7047 - RNA, 21 nt, RNAi-antisense strand
uuucaagccagcugcgccuuu

SEQ ID NO: 7048 - DNA, 21 bp, Homo sapiens
cagctggcttgaaaggaagcc

SEQ ID NO: 7049 - RNA, 21 nt, RNAi-sense strand
gcuggcuugaaaggaagccuu

SEQ ID NO: 7050 - RNA, 21 nt, RNAi-antisense strand
ggcuuccuuucaagccagcuu

SEQ ID NO: 7051 - DNA, 21 bp, Homo sapiens
caggaaatacaggtcttccag

SEQ ID NO: 7052 - RNA, 21 nt, RNAi-sense strand
ggaaauacaggucuuccaguu

SEQ ID NO: 7053 - RNA, 21 nt, RNAi-antisense strand
cuggaagaccuguauuuccuu

SEQ ID NO: 7054 - DNA, 21 bp, Homo sapiens
caggtcttccaggatttccag

SEQ ID NO: 7055 - RNA, 21 nt, RNAi-sense strand
ggucuuccaggauuuccaguu

SEQ ID NO: 7056 - RNA, 21 nt, RNAi-antisense strand
cuggaaauccuggaagaccuu

SEQ ID NO: 7057 - DNA, 21 bp, Homo sapiens
caggacctaaaggcgaactgg

SEQ ID NO: 7058 - RNA, 21 nt, RNAi-sense strand
ggaccuaaaggcgaacugguu

SEQ ID NO: 7059 - RNA, 21 nt, RNAi-antisense strand
ccaguucgccuuuagguccuu

SEQ ID NO: 7060 - DNA, 21 bp, Homo sapiens
caaggagaacctggtctccag

SEQ ID NO: 7061 - RNA, 21 nt, RNAi-sense strand
aggagaaccuggucuccaguu

SEQ ID NO: 7062 - RNA, 21 nt, RNAi-antisense strand
cuggagaccagguucuccuuu

SEQ ID NO: 7063 - DNA, 21 bp, Homo sapiens
cagtgtttcaacaccagttcc

SEQ ID NO: 7064 - RNA, 21 nt, RNAi-sense strand
guguuucaacaccaguuccuu

SEQ ID NO: 7065 - RNA, 21 nt, RNAi-antisense strand
ggaacugguguugaaacacuu

SEQ ID NO: 7066 - DNA, 21 bp, Homo sapiens
caggaattccaggaattggat

SEQ ID NO: 7067 - RNA, 21 nt, RNAi-sense strand
ggaauuccaggaauuggauuu

SEQ ID NO: 7068 - RNA, 21 nt, RNAi-antisense strand
auccaauuccuggaauuccuu

SEQ ID NO: 7069 - DNA, 21 bp, Homo sapiens
cagcagtagccatgcctggag

SEQ ID NO: 7070 - RNA, 21 nt, RNAi-sense strand
gcaguagccaugccuggaguu

SEQ ID NO: 7071 - RNA, 21 nt, RNAi-antisense strand
cuccaggcauggcuacugcuu

SEQ ID NO: 7072 - DNA, 21 bp, Homo sapiens
cagtagccatgcctggaggac

SEQ ID NO: 7073 - RNA, 21 nt, RNAi-sense strand
guagccaugccuggaggacuu

SEQ ID NO: 7074 - RNA, 21 nt, RNAi-antisense strand
guccuccaggcauggcuacuu

SEQ ID NO: 7075 - DNA, 21 bp, Homo sapiens
catgcctggaggaccaggaac

SEQ ID NO: 7076 - RNA, 21 nt, RNAi-sense strand
ugccuggaggaccaggaacuu

SEQ ID NO: 7077 - RNA, 21 nt, RNAi-antisense strand
guuccugguccuccaggcauu

SEQ ID NO: 7078 - DNA, 21 bp, Homo sapiens
caggagaaagaggcaattctg

SEQ ID NO: 7079 - RNA, 21 nt, RNAi-sense strand
ggagaaagaggcaauucuguu

SEQ ID NO: 7080 - RNA, 21 nt, RNAi-antisense strand
cagaauugccucuuucuccuu

SEQ ID NO: 7081 - DNA, 21 bp, Homo sapiens
cagcctggaccacctggagaa

SEQ ID NO: 7082 - RNA, 21 nt, RNAi-sense strand
gccuggaccaccuggagaauu

SEQ ID NO: 7083 - RNA, 21 nt, RNAi-antisense strand
uucuccaggugguccaggcuu

SEQ ID NO: 7084 - DNA, 21 bp, Homo sapiens
caaggacttccaggcttaaat

SEQ ID NO: 7085 - RNA, 21 nt, RNAi-sense strand
aggacuuccaggcuuaaauuu

SEQ ID NO: 7086 - RNA, 21 nt, RNAi-antisense strand
auuuaagccuggaaguccuuu

SEQ ID NO: 7087 - DNA, 21 bp, Homo sapiens
caggcttaaatggattgaaag

SEQ ID NO: 7088 - RNA, 21 nt, RNAi-sense strand
ggcuuaaauggauugaaaguu

SEQ ID NO: 7089 - RNA, 21 nt, RNAi-antisense strand
cuuucaauccauuuaagccuu

SEQ ID NO: 7090 - DNA, 21 bp, Homo sapiens
caacaaggcagaagaggtaaa

SEQ ID NO: 7091 - RNA, 21 nt, RNAi-sense strand
acaaggcagaagagguaaauu

SEQ ID NO: 7092 - RNA, 21 nt, RNAi-antisense strand
uuuaccucuucugccuuguuu

SEQ ID NO: 7093 - DNA, 21 bp, Homo sapiens
caggaattccaggcttggata

SEQ ID NO: 7094 - RNA, 21 nt, RNAi-sense strand
ggaauuccaggcuuggauauu

SEQ ID NO: 7095 - RNA, 21 nt, RNAi-antisense strand
uauccaagccuggaauuccuu

SEQ ID NO: 7096 - DNA, 21 bp, Homo sapiens
caggcttggatagatcaggat

SEQ ID NO: 7097 - RNA, 21 nt, RNAi-sense strand
ggcuuggauagaucaggauuu

SEQ ID NO: 7098 - RNA, 21 nt, RNAi-antisense strand
auccugaucuauccaagccuu

SEQ ID NO: 7099 - DNA, 21 bp, Homo sapiens
caggatttcctggagaaactg

SEQ ID NO: 7100 - RNA, 21 nt, RNAi-sense strand
ggauuuccuggagaaacuguu

SEQ ID NO: 7101 - RNA, 21 nt, RNAi-antisense strand
caguuucuccaggaaauccuu

SEQ ID NO: 7102 - DNA, 21 bp, Homo sapiens
caccaggaattccaggtcatc

SEQ ID NO: 7103 - RNA, 21 nt, RNAi-sense strand
ccaggaauuccaggucaucuu

SEQ ID NO: 7104 - RNA, 21 nt, RNAi-antisense strand
gaugaccuggaauuccugguu

SEQ ID NO: 7105 - DNA, 21 bp, Homo sapiens
caggaattccaggtcatcaag

SEQ ID NO: 7106 - RNA, 21 nt, RNAi-sense strand
ggaauuccaggucaucaaguu

SEQ ID NO: 7107 - RNA, 21 nt, RNAi-antisense strand
cuugaugaccuggaauuccuu

SEQ ID NO: 7108 - DNA, 21 bp, Homo sapiens
caggtcatcaaggtgaaatgg

SEQ ID NO: 7109 - RNA, 21 nt, RNAi-sense strand
ggucaucaaggugaaaugguu

SEQ ID NO: 7110 - RNA, 21 nt, RNAi-antisense strand
ccauuucaccuugaugaccuu

SEQ ID NO: 7111 - DNA, 21 bp, Homo sapiens
caaagaggatatccaggaaat

SEQ ID NO: 7112 - RNA, 21 nt, RNAi-sense strand
aagaggauauccaggaaauuu

SEQ ID NO: 7113 - RNA, 21 nt, RNAi-antisense strand
auuuccuggauauccucuuuu

SEQ ID NO: 7114 - DNA, 21 bp, Homo sapiens
caccaggtgaagatggagtga

SEQ ID NO: 7115 - RNA, 21 nt, RNAi-sense strand
ccaggugaagauggagugauu

SEQ ID NO: 7116 - RNA, 21 nt, RNAi-antisense strand
ucacuccaucuucaccugguu

SEQ ID NO: 7117 - DNA, 21 bp, Homo sapiens
caggtgaagatggagtgattg

SEQ ID NO: 7118 - RNA, 21 nt, RNAi-sense strand
ggugaagauggagugauuguu

SEQ ID NO: 7119 - RNA, 21 nt, RNAi-antisense strand
caaucacuccaucuucaccuu

SEQ ID NO: 7120 - DNA, 21 bp, Homo sapiens
caaaggagaaccaggtctcaa

SEQ ID NO: 7121 - RNA, 21 nt, RNAi-sense strand
aaggagaaccaggucucaauu

SEQ ID NO: 7122 - RNA, 21 nt, RNAi-antisense strand
uugagaccugguucuccuuuu

SEQ ID NO: 7123 - DNA, 21 bp, Homo sapiens
caggtctcaaaggattcgcag

SEQ ID NO: 7124 - RNA, 21 nt, RNAi-sense strand
ggucucaaaggauucgcaguu

SEQ ID NO: 7125 - RNA, 21 nt, RNAi-antisense strand
cugcgaauccuuugagaccuu

SEQ ID NO: 7126 - DNA, 21 bp, Homo sapiens
caaaggattcgcaggaaatcc

SEQ ID NO: 7127 - RNA, 21 nt, RNAi-sense strand
aaggauucgcaggaaauccuu

SEQ ID NO: 7128 - RNA, 21 nt, RNAi-antisense strand
ggauuuccugcgaauccuuuu

SEQ ID NO: 7129 - DNA, 21 bp, Homo sapiens
caggaaatccaggtgagaaag

SEQ ID NO: 7130 - RNA, 21 nt, RNAi-sense strand
ggaaauccaggugagaaaguu

SEQ ID NO: 7131 - RNA, 21 nt, RNAi-antisense strand
cuuucucaccuggauuuccuu

SEQ ID NO: 7132 - DNA, 21 bp, Homo sapiens
caggtgagaaaggaaacagag

SEQ ID NO: 7133 - RNA, 21 nt, RNAi-sense strand
ggugagaaaggaaacagaguu

SEQ ID NO: 7134 - RNA, 21 nt, RNAi-antisense strand
cucuguuuccuuucucaccuu

SEQ ID NO: 7135 - DNA, 21 bp, Homo sapiens
caggactccgtggtataccag

SEQ ID NO: 7136 - RNA, 21 nt, RNAi-sense strand
ggacuccgugguauaccaguu

SEQ ID NO: 7137 - RNA, 21 nt, RNAi-antisense strand
cugguauaccacggaguccuu

SEQ ID NO: 7138 - DNA, 21 bp, Homo sapiens
catgccaggttctaaaggaaa

SEQ ID NO: 7139 - RNA, 21 nt, RNAi-sense strand
ugccagguucuaaaggaaauu

SEQ ID NO: 7140 - RNA, 21 nt, RNAi-antisense strand
uuuccuuuagaaccuggcauu

SEQ ID NO: 7141 - DNA, 21 bp, Homo sapiens
caggtcgagcaggaagaccag

SEQ ID NO: 7142 - RNA, 21 nt, RNAi-sense strand
ggucgagcaggaagaccaguu

SEQ ID NO: 7143 - RNA, 21 nt, RNAi-antisense strand
cuggucuuccugcucgaccuu

SEQ ID NO: 7144 - DNA, 21 bp, Homo sapiens
caggtattcatggtctccagg

SEQ ID NO: 7145 - RNA, 21 nt, RNAi-sense strand
gguauucauggucuccagguu

SEQ ID NO: 7146 - RNA, 21 nt, RNAi-antisense strand
ccuggagaccaugaauaccuu

SEQ ID NO: 7147 - DNA, 21 bp, Homo sapiens
caggttattcagaaggtacaa

SEQ ID NO: 7148 - RNA, 21 nt, RNAi-sense strand
gguuauucagaagguacaauu

SEQ ID NO: 7149 - RNA, 21 nt, RNAi-antisense strand
uuguaccuucugaauaaccuu

SEQ ID NO: 7150 - DNA, 21 bp, Homo sapiens
cagaaggtacaaggccaggac

SEQ ID NO: 7151 - RNA, 21 nt, RNAi-sense strand
gaagguacaaggccaggacuu

SEQ ID NO: 7152 - RNA, 21 nt, RNAi-antisense strand
guccuggccuuguaccuucuu

SEQ ID NO: 7153 - DNA, 21 bp, Homo sapiens
caggaaagccaggtcctcatg

SEQ ID NO: 7154 - RNA, 21 nt, RNAi-sense strand
ggaaagccagguccucauguu

SEQ ID NO: 7155 - RNA, 21 nt, RNAi-antisense strand
caugaggaccuggcuuuccuu

SEQ ID NO: 7156 - DNA, 21 bp, Homo sapiens
caggtcctcatggtgatttgg

SEQ ID NO: 7157 - RNA, 21 nt, RNAi-sense strand
gguccucauggugauuugguu

SEQ ID NO: 7158 - RNA, 21 nt, RNAi-antisense strand
ccaaaucaccaugaggaccuu

SEQ ID NO: 7159 - DNA, 21 bp, Homo sapiens
caggtcttccaggatttccag

SEQ ID NO: 7160 - RNA, 21 nt, RNAi-sense strand
ggucuuccaggauuuccaguu

SEQ ID NO: 7161 - RNA, 21 nt, RNAi-antisense strand
cuggaaauccuggaagaccuu

SEQ ID NO: 7162 - DNA, 21 bp, Homo sapiens
caggatttccaggatctcctg

SEQ ID NO: 7163 - RNA, 21 nt, RNAi-sense strand
ggauuuccaggaucuccuguu

SEQ ID NO: 7164 - RNA, 21 nt, RNAi-antisense strand
caggagauccuggaaauccuu

SEQ ID NO: 7165 - DNA, 21 bp, Homo sapiens
caggatctcctggaccaatgg

SEQ ID NO: 7166 - RNA, 21 nt, RNAi-sense strand
ggaucuccuggaccaaugguu

SEQ ID NO: 7167 - RNA, 21 nt, RNAi-antisense strand
ccauugguccaggagauccuu

SEQ ID NO: 7168 - DNA, 21 bp, Homo sapiens
caaggacgtgatggaattcct

SEQ ID NO: 7169 - RNA, 21 nt, RNAi-sense strand
aggacgugauggaauuccuuu

SEQ ID NO: 7170 - RNA, 21 nt, RNAi-antisense strand
aggaauuccaucacguccuuu

SEQ ID NO: 7171 - DNA, 21 bp, Homo sapiens
caaggagccaaaggagacagg

SEQ ID NO: 7172 - RNA, 21 nt, RNAi-sense strand
aggagccaaaggagacagguu

SEQ ID NO: 7173 - RNA, 21 nt, RNAi-antisense strand
ccugucuccuuuggcuccuuu

SEQ ID NO: 7174 - DNA, 21 bp, Homo sapiens
cagacaggaaatcgtggtcca

SEQ ID NO: 7175 - RNA, 21 nt, RNAi-sense strand
gacaggaaaucgugguccauu

SEQ ID NO: 7176 - RNA, 21 nt, RNAi-antisense strand
uggaccacgauuuccugucuu

SEQ ID NO: 7177 - DNA, 21 bp, Homo sapiens
caggaaatcgtggtccaccag

SEQ ID NO: 7178 - RNA, 21 nt, RNAi-sense strand
ggaaaucgugguccaccaguu

SEQ ID NO: 7179 - RNA, 21 nt, RNAi-antisense strand
cugguggaccacgauuuccuu

SEQ ID NO: 7180 - DNA, 21 bp, Homo sapiens
caccaggctcaagaggaagcc

SEQ ID NO: 7181 - RNA, 21 nt, RNAi-sense strand
ccaggcucaagaggaagccuu

SEQ ID NO: 7182 - RNA, 21 nt, RNAi-antisense strand
ggcuuccucuugagccugguu

SEQ ID NO: 7183 - DNA, 21 bp, Homo sapiens
cacctggaactgcaggagaca

SEQ ID NO: 7184 - RNA, 21 nt, RNAi-sense strand
ccuggaacugcaggagacauu

SEQ ID NO: 7185 - RNA, 21 nt, RNAi-antisense strand
ugucuccugcaguuccagguu

SEQ ID NO: 7186 - DNA, 21 bp, Homo sapiens
caccaggtactccaggtcttc

SEQ ID NO: 7187 - RNA, 21 nt, RNAi-sense strand
ccagguacuccaggucuucuu

SEQ ID NO: 7188 - RNA, 21 nt, RNAi-antisense strand
gaagaccuggaguaccugguu

SEQ ID NO: 7189 - DNA, 21 bp, Homo sapiens
caggtactccaggtcttccag

SEQ ID NO: 7190 - RNA, 21 nt, RNAi-sense strand
gguacuccaggucuuccaguu

SEQ ID NO: 7191 - RNA, 21 nt, RNAi-antisense strand
cuggaagaccuggaguaccuu

SEQ ID NO: 7192 - DNA, 21 bp, Homo sapiens
cagaggtgatcctggattcca

SEQ ID NO: 7193 - RNA, 21 nt, RNAi-sense strand
gaggugauccuggauuccauu

SEQ ID NO: 7194 - RNA, 21 nt, RNAi-antisense strand
uggaauccaggaucaccucuu

SEQ ID NO: 7195 - DNA, 21 bp, Homo sapiens
cattggacctccaggaccaat

SEQ ID NO: 7196 - RNA, 21 nt, RNAi-sense strand
uuggaccuccaggaccaauuu

SEQ ID NO: 7197 - RNA, 21 nt, RNAi-antisense strand
auugguccuggagguccaauu

SEQ ID NO: 7198 - DNA, 21 bp, Homo sapiens
cacctggtgtacgtggagacc

SEQ ID NO: 7199 - RNA, 21 nt, RNAi-sense strand
ccugguguacguggagaccuu

SEQ ID NO: 7200 - RNA, 21 nt, RNAi-antisense strand
ggucuccacguacaccagguu

SEQ ID NO: 7201 - DNA, 21 bp, Homo sapiens
cacctggcacacctggagaac

SEQ ID NO: 7202 - RNA, 21 nt, RNAi-sense strand
ccuggcacaccuggagaacuu

SEQ ID NO: 7203 - RNA, 21 nt, RNAi-antisense strand
guucuccaggugugccagguu

SEQ ID NO: 7204 - DNA, 21 bp, Homo sapiens
caagaggtaagccaggcaagg

SEQ ID NO: 7205 - RNA, 21 nt, RNAi-sense strand
agagguaagccaggcaagguu

SEQ ID NO: 7206 - RNA, 21 nt, RNAi-antisense strand
ccuugccuggcuuaccucuuu

SEQ ID NO: 7207 - DNA, 21 bp, Homo sapiens
caggaactcctggaccagctg

SEQ ID NO: 7208 - RNA, 21 nt, RNAi-sense strand
ggaacuccuggaccagcuguu

SEQ ID NO: 7209 - RNA, 21 nt, RNAi-antisense strand
cagcugguccaggaguuccuu

SEQ ID NO: 7210 - DNA, 21 bp, Homo sapiens
caacaaaggttctaaaggaga

SEQ ID NO: 7211 - RNA, 21 nt, RNAi-sense strand
acaaagguucuaaaggagauu

SEQ ID NO: 7212 - RNA, 21 nt, RNAi-antisense strand
ucuccuuuagaaccuuuguuu

SEQ ID NO: 7213 - DNA, 21 bp, Homo sapiens
caaaggttctaaaggagagcc

SEQ ID NO: 7214 - RNA, 21 nt, RNAi-sense strand
aagguucuaaaggagagccuu

SEQ ID NO: 7215 - RNA, 21 nt, RNAi-antisense strand
ggcucuccuuuagaaccuuuu

SEQ ID NO: 7216 - DNA, 21 bp, Homo sapiens
caggaccagctggatcagatg

SEQ ID NO: 7217 - RNA, 21 nt, RNAi-sense strand
ggaccagcuggaucagauguu

SEQ ID NO: 7218 - RNA, 21 nt, RNAi-antisense strand
caucugauccagcugguccuu

SEQ ID NO: 7219 - DNA, 21 bp, Homo sapiens
cagctggatcagatggattgc

SEQ ID NO: 7220 - RNA, 21 nt, RNAi-sense strand
gcuggaucagauggauugcuu

SEQ ID NO: 7221 - RNA, 21 nt, RNAi-antisense strand
gcaauccaucugauccagcuu

SEQ ID NO: 7222 - DNA, 21 bp, Homo sapiens
cagatggattgccaggtttga

SEQ ID NO: 7223 - RNA, 21 nt, RNAi-sense strand
gauggauugccagguuugauu

SEQ ID NO: 7224 - RNA, 21 nt, RNAi-antisense strand
ucaaaccuggcaauccaucuu

SEQ ID NO: 7225 - DNA, 21 bp, Homo sapiens
cagtggatcacctgcaacctg

SEQ ID NO: 7226 - RNA, 21 nt, RNAi-sense strand
guggaucaccugcaaccuguu

SEQ ID NO: 7227 - RNA, 21 nt, RNAi-antisense strand
cagguugcaggugauccacuu

SEQ ID NO: 7228 - DNA, 21 bp, Homo sapiens
cacctgcaacctggacaacga

SEQ ID NO: 7229 - RNA, 21 nt, RNAi-sense strand
ccugcaaccuggacaacgauu

SEQ ID NO: 7230 - RNA, 21 nt, RNAi-antisense strand
ucguuguccagguugcagguu

SEQ ID NO: 7231 - DNA, 21 bp, Homo sapiens
caacctggacaacgagaggct

SEQ ID NO: 7232 - RNA, 21 nt, RNAi-sense strand
accuggacaacgagaggcuuu

SEQ ID NO: 7233 - RNA, 21 nt, RNAi-antisense strand
agccucucguuguccagguuu

SEQ ID NO: 7234 - DNA, 21 bp, Homo sapiens
caacgagaggctttgtcttca

SEQ ID NO: 7235 - RNA, 21 nt, RNAi-sense strand
acgagaggcuuugucuucauu

SEQ ID NO: 7236 - RNA, 21 nt, RNAi-antisense strand
ugaagacaaagccucucguuu

SEQ ID NO: 7237 - DNA, 21 bp, Homo sapiens
cacagtcaaaccacagcaatt

SEQ ID NO: 7238 - RNA, 21 nt, RNAi-sense strand
cagucaaaccacagcaauuuu

SEQ ID NO: 7239 - RNA, 21 nt, RNAi-antisense strand
aauugcugugguuugacuguu

SEQ ID NO: 7240 - DNA, 21 bp, Homo sapiens
cagtcaaaccacagcaattcc

SEQ ID NO: 7241 - RNA, 21 nt, RNAi-sense strand
gucaaaccacagcaauuccuu

SEQ ID NO: 7242 - RNA, 21 nt, RNAi-antisense strand
ggaauugcugugguuugacuu

SEQ ID NO: 7243 - DNA, 21 bp, Homo sapiens
caaaccacagcaattccttca

SEQ ID NO: 7244 - RNA, 21 nt, RNAi-sense strand
aaccacagcaauuccuucauu

SEQ ID NO: 7245 - RNA, 21 nt, RNAi-antisense strand
ugaaggaauugcugugguuuu

SEQ ID NO: 7246 - DNA, 21 bp, Homo sapiens
cacagcaattccttcatgtcc

SEQ ID NO: 7247 - RNA, 21 nt, RNAi-sense strand
cagcaauuccuucauguccuu

SEQ ID NO: 7248 - RNA, 21 nt, RNAi-antisense strand
ggacaugaaggaauugcuguu

SEQ ID NO: 7249 - DNA, 21 bp, Homo sapiens
cagcaattccttcatgtccag

SEQ ID NO: 7250 - RNA, 21 nt, RNAi-sense strand
gcaauuccuucauguccaguu

SEQ ID NO: 7251 - RNA, 21 nt, RNAi-antisense strand
cuggacaugaaggaauugcuu

SEQ ID NO: 7252 - DNA, 21 bp, Homo sapiens
caattccttcatgtccagagg

SEQ ID NO: 7253 - RNA, 21 nt, RNAi-sense strand
auuccuucauguccagagguu

SEQ ID NO: 7254 - RNA, 21 nt, RNAi-antisense strand
ccucuggacaugaaggaauuu

SEQ ID NO: 7255 - DNA, 21 bp, Homo sapiens
cacggacaagaccttggaact

SEQ ID NO: 7256 - RNA, 21 nt, RNAi-sense strand
cggacaagaccuuggaacuuu

SEQ ID NO: 7257 - RNA, 21 nt, RNAi-antisense strand
aguuccaaggucuuguccguu

SEQ ID NO: 7258 - DNA, 21 bp, Homo sapiens
caagaccttggaactcttggc

SEQ ID NO: 7259 - RNA, 21 nt, RNAi-sense strand
agaccuuggaacucuuggcuu

SEQ ID NO: 7260 - RNA, 21 nt, RNAi-antisense strand
gccaagaguuccaaggucuuu

SEQ ID NO: 7261 - DNA, 21 bp, Homo sapiens
cagctgcctgcagcgatttac

SEQ ID NO: 7262 - RNA, 21 nt, RNAi-sense strand
gcugccugcagcgauuuacuu

SEQ ID NO: 7263 - RNA, 21 nt, RNAi-antisense strand
guaaaucgcugcaggcagcuu

SEQ ID NO: 7264 - DNA, 21 bp, Homo sapiens
cagcgatttaccacaatgcca

SEQ ID NO: 7265 - RNA, 21 nt, RNAi-sense strand
gcgauuuaccacaaugccauu

SEQ ID NO: 7266 - RNA, 21 nt, RNAi-antisense strand
uggcauugugguaaaucgcuu

SEQ ID NO: 7267 - DNA, 21 bp, Homo sapiens
cacaatgccattcttattctg

SEQ ID NO: 7268 - RNA, 21 nt, RNAi-sense strand
caaugccauucuuauucuguu

SEQ ID NO: 7269 - RNA, 21 nt, RNAi-antisense strand
cagaauaagaauggcauuguu

SEQ ID NO: 7270 - DNA, 21 bp, Homo sapiens
caatgccattcttattctgca

SEQ ID NO: 7271 - RNA, 21 nt, RNAi-sense strand
augccauucuuauucugcauu

SEQ ID NO: 7272 - RNA, 21 nt, RNAi-antisense strand
ugcagaauaagaauggcauuu

SEQ ID NO: 7273 - DNA, 21 bp, Homo sapiens
cattcttattctgcaatgtca

SEQ ID NO: 7274 - RNA, 21 nt, RNAi-sense strand
uucuuauucugcaaugucauu

SEQ ID NO: 7275 - RNA, 21 nt, RNAi-antisense strand
ugacauugcagaauaagaauu

SEQ ID NO: 7276 - DNA, 21 bp, Homo sapiens
catactggctgtcaacaccag

SEQ ID NO: 7277 - RNA, 21 nt, RNAi-sense strand
uacuggcugucaacaccaguu

SEQ ID NO: 7278 - RNA, 21 nt, RNAi-antisense strand
cugguguugacagccaguauu

SEQ ID NO: 7279 - DNA, 21 bp, Homo sapiens
caacaccagctctgatgccaa

SEQ ID NO: 7280 - RNA, 21 nt, RNAi-sense strand
acaccagcucugaugccaauu

SEQ ID NO: 7281 - RNA, 21 nt, RNAi-antisense strand
uuggcaucagagcugguguuu

SEQ ID NO: 7282 - DNA, 21 bp, Homo sapiens
caccagctctgatgccaatga

SEQ ID NO: 7283 - RNA, 21 nt, RNAi-sense strand
ccagcucugaugccaaugauu

SEQ ID NO: 7284 - RNA, 21 nt, RNAi-antisense strand
ucauuggcaucagagcugguu

SEQ ID NO: 7285 - DNA, 21 bp, Homo sapiens
cagctctgatgccaatgaaca

SEQ ID NO: 7286 - RNA, 21 nt, RNAi-sense strand
gcucugaugccaaugaacauu

SEQ ID NO: 7287 - RNA, 21 nt, RNAi-antisense strand
uguucauuggcaucagagcuu

SEQ ID NO: 7288 - DNA, 21 bp, Homo sapiens
cagatgcactgtttgtgaagg

SEQ ID NO: 7289 - RNA, 21 nt, RNAi-sense strand
gaugcacuguuugugaagguu

SEQ ID NO: 7290 - RNA, 21 nt, RNAi-antisense strand
ccuucacaaacagugcaucuu

SEQ ID NO: 7291 - DNA, 21 bp, Homo sapiens
cactgtttgtgaaggtcctgc

SEQ ID NO: 7292 - RNA, 21 nt, RNAi-sense strand
cuguuugugaagguccugcuu

SEQ ID NO: 7293 - RNA, 21 nt, RNAi-antisense strand
gcaggaccuucacaaacaguu

SEQ ID NO: 7294 - DNA, 21 bp, Homo sapiens
catagccgttcacagccaaac

SEQ ID NO: 7295 - RNA, 21 nt, RNAi-sense strand
uagccguucacagccaaacuu

SEQ ID NO: 7296 - RNA, 21 nt, RNAi-antisense strand
guuuggcugugaacggcuauu

SEQ ID NO: 7297 - DNA, 21 bp, Homo sapiens
cacagccaaaccactgacatt

SEQ ID NO: 7298 - RNA, 21 nt, RNAi-sense strand
cagccaaaccacugacauuuu

SEQ ID NO: 7299 - RNA, 21 nt, RNAi-antisense strand
aaugucagugguuuggcuguu

SEQ ID NO: 7300 - DNA, 21 bp, Homo sapiens
cagccaaaccactgacattcc

SEQ ID NO: 7301 - RNA, 21 nt, RNAi-sense strand
gccaaaccacugacauuccuu

SEQ ID NO: 7302 - RNA, 21 nt, RNAi-antisense strand
ggaaugucagugguuuggcuu

SEQ ID NO: 7303 - DNA, 21 bp, Homo sapiens
caaaccactgacattcctcca

SEQ ID NO: 7304 - RNA, 21 nt, RNAi-sense strand
aaccacugacauuccuccauu

SEQ ID NO: 7305 - RNA, 21 nt, RNAi-antisense strand
uggaggaaugucagugguuuu

SEQ ID NO: 7306 - DNA, 21 bp, Homo sapiens
cactgacattcctccatgtcc

SEQ ID NO: 7307 - RNA, 21 nt, RNAi-sense strand
cugacauuccuccauguccuu

SEQ ID NO: 7308 - RNA, 21 nt, RNAi-antisense strand
ggacauggaggaaugucaguu

SEQ ID NO: 7309 - DNA, 21 bp, Homo sapiens
cattcctccatgtcctcacgg

SEQ ID NO: 7310 - RNA, 21 nt, RNAi-sense strand
uuccuccauguccucacgguu

SEQ ID NO: 7311 - RNA, 21 nt, RNAi-antisense strand
ccgugaggacauggaggaauu

SEQ ID NO: 7312 - DNA, 21 bp, Homo sapiens
catgtcctcacggctggattt

SEQ ID NO: 7313 - RNA, 21 nt, RNAi-sense strand
uguccucacggcuggauuuuu

SEQ ID NO: 7314 - RNA, 21 nt, RNAi-antisense strand
aaauccagccgugaggacauu

SEQ ID NO: 7315 - DNA, 21 bp, Homo sapiens
cacggctggatttctctctgg

SEQ ID NO: 7316 - RNA, 21 nt, RNAi-sense strand
cggcuggauuucucucugguu

SEQ ID NO: 7317 - RNA, 21 nt, RNAi-antisense strand
ccagagagaaauccagccguu

SEQ ID NO: 7318 - DNA, 21 bp, Homo sapiens
cattcatcatgttcacaagtg

SEQ ID NO: 7319 - RNA, 21 nt, RNAi-sense strand
uucaucauguucacaaguguu

SEQ ID NO: 7320 - RNA, 21 nt, RNAi-antisense strand
cacuugugaacaugaugaauu

SEQ ID NO: 7321 - DNA, 21 bp, Homo sapiens
catcatgttcacaagtgcagg

SEQ ID NO: 7322 - RNA, 21 nt, RNAi-sense strand
ucauguucacaagugcagguu

SEQ ID NO: 7323 - RNA, 21 nt, RNAi-antisense strand
ccugcacuugugaacaugauu

SEQ ID NO: 7324 - DNA, 21 bp, Homo sapiens
catgttcacaagtgcaggttc

SEQ ID NO: 7325 - RNA, 21 nt, RNAi-sense strand
uguucacaagugcagguucuu

SEQ ID NO: 7326 - RNA, 21 nt, RNAi-antisense strand
gaaccugcacuugugaacauu

SEQ ID NO: 7327 - DNA, 21 bp, Homo sapiens
catttctagaatgtcatggaa

SEQ ID NO: 7328 - RNA, 21 nt, RNAi-sense strand
uuucuagaaugucauggaauu

SEQ ID NO: 7329 - RNA, 21 nt, RNAi-antisense strand
uuccaugacauucuagaaauu

SEQ ID NO: 7330 - DNA, 21 bp, Homo sapiens
catggaagaggaacgtgcaac

SEQ ID NO: 7331 - RNA, 21 nt, RNAi-sense strand
uggaagaggaacgugcaacuu

SEQ ID NO: 7332 - RNA, 21 nt, RNAi-antisense strand
guugcacguuccucuuccauu

SEQ ID NO: 7333 - DNA, 21 bp, Homo sapiens
caaattcctacagtttctggc

SEQ ID NO: 7334 - RNA, 21 nt, RNAi-sense strand
aauuccuacaguuucuggcuu

SEQ ID NO: 7335 - RNA, 21 nt, RNAi-antisense strand
gccagaaacuguaggaauuuu

SEQ ID NO: 7336 - DNA, 21 bp, Homo sapiens
cagtttctggctggcttcatt

SEQ ID NO: 7337 - RNA, 21 nt, RNAi-sense strand
guuucuggcuggcuucauuuu

SEQ ID NO: 7338 - RNA, 21 nt, RNAi-antisense strand
aaugaagccagccagaaacuu

SEQ ID NO: 7339 - DNA, 21 bp, Homo sapiens
cagaaagaatgttcagaaagc

SEQ ID NO: 7340 - RNA, 21 nt, RNAi-sense strand
gaaagaauguucagaaagcuu

SEQ ID NO: 7341 - RNA, 21 nt, RNAi-antisense strand
gcuuucugaacauucuuucuu

SEQ ID NO: 7342 - DNA, 21 bp, Homo sapiens
cagaaagcctattccatcaac

SEQ ID NO: 7343 - RNA, 21 nt, RNAi-sense strand
gaaagccuauuccaucaacuu

SEQ ID NO: 7344 - RNA, 21 nt, RNAi-antisense strand
guugauggaauaggcuuucuu

SEQ ID NO: 7345 - DNA, 21 bp, Homo sapiens
caaagtaatgacagaacatgc

SEQ ID NO: 7346 - RNA, 21 nt, RNAi-sense strand
aaguaaugacagaacaugcuu

SEQ ID NO: 7347 - RNA, 21 nt, RNAi-antisense strand
gcauguucugucauuacuuuu

SEQ ID NO: 7348 - DNA, 21 bp, Homo sapiens
cagaacatgctgttatttagg

SEQ ID NO: 7349 - RNA, 21 nt, RNAi-sense strand
gaacaugcuguuauuuagguu

SEQ ID NO: 7350 - RNA, 21 nt, RNAi-antisense strand
ccuaaauaacagcauguucuu

SEQ ID NO: 7351 - DNA, 21 bp, Homo sapiens
caaacaatattgctccatgat

SEQ ID NO: 7352 - RNA, 21 nt, RNAi-sense strand
aacaauauugcuccaugauuu

SEQ ID NO: 7353 - RNA, 21 nt, RNAi-antisense strand
aucauggagcaauauuguuuu

SEQ ID NO: 7354 - DNA, 21 bp, Homo sapiens
caatattgctccatgatgact

SEQ ID NO: 7355 - RNA, 21 nt, RNAi-sense strand
auauugcuccaugaugacuuu

SEQ ID NO: 7356 - RNA, 21 nt, RNAi-antisense strand
agucaucauggagcaauauuu

SEQ ID NO: 7357 - DNA, 21 bp, Homo sapiens
catgatgacttagtacaaagt

SEQ ID NO: 7358 - RNA, 21 nt, RNAi-sense strand
ugaugacuuaguacaaaguuu

SEQ ID NO: 7359 - RNA, 21 nt, RNAi-antisense strand
acuuuguacuaagucaucauu

SEQ ID NO: 7360 - DNA, 21 bp, Homo sapiens
caaagcaattctttcaagtgc

SEQ ID NO: 7361 - RNA, 21 nt, RNAi-sense strand
aagcaauucuuucaagugcuu

SEQ ID NO: 7362 - RNA, 21 nt, RNAi-antisense strand
gcacuugaaagaauugcuuuu

SEQ ID NO: 7363 - DNA, 21 bp, Homo sapiens
caattctttcaagtgcagttc

SEQ ID NO: 7364 - RNA, 21 nt, RNAi-sense strand
auucuuucaagugcaguucuu

SEQ ID NO: 7365 - RNA, 21 nt, RNAi-antisense strand
gaacugcacuugaaagaauuu

SEQ ID NO: 7366 - DNA, 21 bp, Homo sapiens
caagtgcagttctgtgatctg

SEQ ID NO: 7367 - RNA, 21 nt, RNAi-sense strand
agugcaguucugugaucuguu

SEQ ID NO: 7368 - RNA, 21 nt, RNAi-antisense strand
cagaucacagaacugcacuuu

SEQ ID NO: 7369 - DNA, 21 bp, Homo sapiens
caaagttctctgtggcaaagc

SEQ ID NO: 7370 - RNA, 21 nt, RNAi-sense strand
aaguucucuguggcaaagcuu

SEQ ID NO: 7371 - RNA, 21 nt, RNAi-antisense strand
gcuuugccacagagaacuuuu

SEQ ID NO: 7372 - DNA, 21 bp, Homo sapiens
caaagcagcaactattcacaa

SEQ ID NO: 7373 - RNA, 21 nt, RNAi-sense strand
aagcagcaacuauucacaauu

SEQ ID NO: 7374 - RNA, 21 nt, RNAi-antisense strand
uugugaauaguugcugcuuuu

SEQ ID NO: 7375 - DNA, 21 bp, Homo sapiens
cacttacatccaaggcactgt

SEQ ID NO: 7376 - RNA, 21 nt, RNAi-sense strand
cuuacauccaaggcacuguuu

SEQ ID NO: 7377 - RNA, 21 nt, RNAi-antisense strand
acagugccuuggauguaaguu

SEQ ID NO: 7378 - DNA, 21 bp, Homo sapiens
catccaaggcactgtcactac

SEQ ID NO: 7379 - RNA, 21 nt, RNAi-sense strand
uccaaggcacugucacuacuu

SEQ ID NO: 7380 - RNA, 21 nt, RNAi-antisense strand
guagugacagugccuuggauu

SEQ ID NO: 7381 - DNA, 21 bp, Homo sapiens
caaggcactgtcactacggtg

SEQ ID NO: 7382 - RNA, 21 nt, RNAi-sense strand
aggcacugucacuacgguguu

SEQ ID NO: 7383 - RNA, 21 nt, RNAi-antisense strand
caccguagugacagugccuuu

SEQ ID NO: 7384 - DNA, 21 bp, Homo sapiens
cactgtcactacggtgattgt

SEQ ID NO: 7385 - RNA, 21 nt, RNAi-sense strand
cugucacuacggugauuguuu

SEQ ID NO: 7386 - RNA, 21 nt, RNAi-antisense strand
acaaucaccguagugacaguu

SEQ ID NO: 7387 - DNA, 21 bp, Homo sapiens
cactacggtgattgtatgaag

SEQ ID NO: 7388 - RNA, 21 nt, RNAi-sense strand
cuacggugauuguaugaaguu

SEQ ID NO: 7389 - RNA, 21 nt, RNAi-antisense strand
cuucauacaaucaccguaguu

SEQ ID NO: 7390 - DNA, 21 bp, Homo sapiens
cacgttatgaaatatttggcc

SEQ ID NO: 7391 - RNA, 21 nt, RNAi-sense strand
cguuaugaaauauuuggccuu

SEQ ID NO: 7392 - RNA, 21 nt, RNAi-antisense strand
ggccaaauauuucauaacguu

SEQ ID NO: 7393 - DNA, 21 bp, Homo sapiens
cacatttgtcttctttctgtc

SEQ ID NO: 7394 - RNA, 21 nt, RNAi-sense strand
cauuugucuucuuucugucuu

SEQ ID NO: 7395 - RNA, 21 nt, RNAi-antisense strand
gacagaaagaagacaaauguu

SEQ ID NO: 7396 - DNA, 21 bp, Homo sapiens
catttgtcttctttctgtctt

SEQ ID NO: 7397 - RNA, 21 nt, RNAi-sense strand
uuugucuucuuucugucuuuu

SEQ ID NO: 7398 - RNA, 21 nt, RNAi-antisense strand
aagacagaaagaagacaaauu

SEQ ID NO: 7399 - DNA, 21 bp, Homo sapiens
catgtggtatctggagcattg

SEQ ID NO: 7400 - RNA, 21 nt, RNAi-sense strand
ugugguaucuggagcauuguu

SEQ ID NO: 7401 - RNA, 21 nt, RNAi-antisense strand
caaugcuccagauaccacauu

SEQ ID NO: 7402 - DNA, 21 bp, Homo sapiens
cattgtgtatagaactggatt

SEQ ID NO: 7403 - RNA, 21 nt, RNAi-sense strand
uuguguauagaacuggauuuu

SEQ ID NO: 7404 - RNA, 21 nt, RNAi-antisense strand
aauccaguucuauacacaauu

SEQ ID NO: 7405 - DNA, 21 bp, Homo sapiens
cagacctgctgaggaccgtaa

SEQ ID NO: 7406 - RNA, 21 nt, RNAi-sense strand
gaccugcugaggaccguaauu

SEQ ID NO: 7407 - RNA, 21 nt, RNAi-antisense strand
uuacgguccucagcaggucuu

SEQ ID NO: 7408 - DNA, 21 bp, Homo sapiens
cacagaactgaactgaggttc

SEQ ID NO: 7409 - RNA, 21 nt, RNAi-sense strand
cagaacugaacugagguucuu

SEQ ID NO: 7410 - RNA, 21 nt, RNAi-antisense strand
gaaccucaguucaguucuguu

SEQ ID NO: 7411 - DNA, 21 bp, Homo sapiens
cagaactgaactgaggttcat

SEQ ID NO: 7412 - RNA, 21 nt, RNAi-sense strand
gaacugaacugagguucauuu

SEQ ID NO: 7413 - RNA, 21 nt, RNAi-antisense strand
augaaccucaguucaguucuu

SEQ ID NO: 7414 - DNA, 21 bp, Homo sapiens
caggactgtttcaaacatgcc

SEQ ID NO: 7415 - RNA, 21 nt, RNAi-sense strand
ggacuguuucaaacaugccuu

SEQ ID NO: 7416 - RNA, 21 nt, RNAi-antisense strand
ggcauguuugaaacaguccuu

SEQ ID NO: 7417 - DNA, 21 bp, Homo sapiens
cagcatacgcacacaaataac

SEQ ID NO: 7418 - RNA, 21 nt, RNAi-sense strand
gcauacgcacacaaauaacuu

SEQ ID NO: 7419 - RNA, 21 nt, RNAi-antisense strand
guuauuugugugcguaugcuu

SEQ ID NO: 7420 - DNA, 21 bp, Homo sapiens
catacgcacacaaataacaag

SEQ ID NO: 7421 - RNA, 21 nt, RNAi-sense strand
uacgcacacaaauaacaaguu

SEQ ID NO: 7422 - RNA, 21 nt, RNAi-antisense strand
cuuguuauuugugugcguauu

SEQ ID NO: 7423 - DNA, 21 bp, Homo sapiens
cactttatcctcattccataa

SEQ ID NO: 7424 - RNA, 21 nt, RNAi-sense strand
cuuuauccucauuccauaauu

SEQ ID NO: 7425 - RNA, 21 nt, RNAi-antisense strand
uuauggaaugaggauaaaguu

SEQ ID NO: 7426 - DNA, 21 bp, Homo sapiens
cattccataaatgttggtgca

SEQ ID NO: 7427 - RNA, 21 nt, RNAi-sense strand
uuccauaaauguuggugcauu

SEQ ID NO: 7428 - RNA, 21 nt, RNAi-antisense strand
ugcaccaacauuuauggaauu

SEQ ID NO: 7429 - DNA, 21 bp, Homo sapiens
cataaatgttggtgcatacct

SEQ ID NO: 7430 - RNA, 21 nt, RNAi-sense strand
uaaauguuggugcauaccuuu

SEQ ID NO: 7431 - RNA, 21 nt, RNAi-antisense strand
agguaugcaccaacauuuauu

SEQ ID NO: 7432 - DNA, 21 bp, Homo sapiens
cagttcaataatccatgaaag

SEQ ID NO: 7433 - RNA, 21 nt, RNAi-sense strand
guucaauaauccaugaaaguu

SEQ ID NO: 7434 - RNA, 21 nt, RNAi-antisense strand
cuuucauggauuauugaacuu

SEQ ID NO: 7435 - DNA, 21 bp, Homo sapiens
catgaaagaacttaaggcatt

SEQ ID NO: 7436 - RNA, 21 nt, RNAi-sense strand
ugaaagaacuuaaggcauuuu

SEQ ID NO: 7437 - RNA, 21 nt, RNAi-antisense strand
aaugccuuaaguucuuucauu

SEQ ID NO: 7438 - DNA, 21 bp, Homo sapiens
catttgttggtttatcagact

SEQ ID NO: 7439 - RNA, 21 nt, RNAi-sense strand
uuuguugguuuaucagacuuu

SEQ ID NO: 7440 - RNA, 21 nt, RNAi-antisense strand
agucugauaaaccaacaaauu

SEQ ID NO: 7441 - DNA, 21 bp, Homo sapiens
cattgctctgaatatgtcatc

SEQ ID NO: 7442 - RNA, 21 nt, RNAi-sense strand
uugcucugaauaugucaucuu

SEQ ID NO: 7443 - RNA, 21 nt, RNAi-antisense strand
gaugacauauucagagcaauu

SEQ ID NO: 7444 - DNA, 21 bp, Homo sapiens
caaaccatactgaaagagtca

SEQ ID NO: 7445 - RNA, 21 nt, RNAi-sense strand
aaccauacugaaagagucauu

SEQ ID NO: 7446 - RNA, 21 nt, RNAi-antisense strand
ugacucuuucaguaugguuuu

SEQ ID NO: 7447 - DNA, 21 bp, Homo sapiens
catactgaaagagtcattgtt

SEQ ID NO: 7448 - RNA, 21 nt, RNAi-sense strand
uacugaaagagucauuguuuu

SEQ ID NO: 7449 - RNA, 21 nt, RNAi-antisense strand
aacaaugacucuuucaguauu

SEQ ID NO: 7450 - DNA, 21 bp, Homo sapiens
caaactgtataacttggccgc

SEQ ID NO: 7451 - RNA, 21 nt, RNAi-sense strand
aacuguauaacuuggccgcuu

SEQ ID NO: 7452 - RNA, 21 nt, RNAi-antisense strand
gcggccaaguuauacaguuuu

SEQ ID NO: 7453 - DNA, 21 bp, Homo sapiens
catgttattcagcaccaagca

SEQ ID NO: 7454 - RNA, 21 nt, RNAi-sense strand
uguuauucagcaccaagcauu

SEQ ID NO: 7455 - RNA, 21 nt, RNAi-antisense strand
ugcuuggugcugaauaacauu

SEQ ID NO: 7456 - DNA, 21 bp, Homo sapiens
cagcaccaagcatgtccaggc

SEQ ID NO: 7457 - RNA, 21 nt, RNAi-sense strand
gcaccaagcauguccaggcuu

SEQ ID NO: 7458 - RNA, 21 nt, RNAi-antisense strand
gccuggacaugcuuggugcuu

SEQ ID NO: 7459 - DNA, 21 bp, Homo sapiens
caccaagcatgtccaggcact

SEQ ID NO: 7460 - RNA, 21 nt, RNAi-sense strand
ccaagcauguccaggcacuuu

SEQ ID NO: 7461 - RNA, 21 nt, RNAi-antisense strand
agugccuggacaugcuugguu

SEQ ID NO: 7462 - DNA, 21 bp, Homo sapiens
caagcatgtccaggcactgta

SEQ ID NO: 7463 - RNA, 21 nt, RNAi-sense strand
agcauguccaggcacuguauu

SEQ ID NO: 7464 - RNA, 21 nt, RNAi-antisense strand
uacagugccuggacaugcuuu

SEQ ID NO: 7465 - DNA, 21 bp, Homo sapiens
catgtccaggcactgtactaa

SEQ ID NO: 7466 - RNA, 21 nt, RNAi-sense strand
uguccaggcacuguacuaauu

SEQ ID NO: 7467 - RNA, 21 nt, RNAi-antisense strand
uuaguacagugccuggacauu

SEQ ID NO: 7468 - DNA, 21 bp, Homo sapiens
caggcactgtactaacctaca

SEQ ID NO: 7469 - RNA, 21 nt, RNAi-sense strand
ggcacuguacuaaccuacauu

SEQ ID NO: 7470 - RNA, 21 nt, RNAi-antisense strand
uguagguuaguacagugccuu

SEQ ID NO: 7471 - DNA, 21 bp, Homo sapiens
cactgtactaacctacagaga

SEQ ID NO: 7472 - RNA, 21 nt, RNAi-sense strand
cuguacuaaccuacagagauu

SEQ ID NO: 7473 - RNA, 21 nt, RNAi-antisense strand
ucucuguagguuaguacaguu

SEQ ID NO: 7474 - DNA, 21 bp, Homo sapiens
cattgctctgtaataatctca

SEQ ID NO: 7475 - RNA, 21 nt, RNAi-sense strand
uugcucuguaauaaucucauu

SEQ ID NO: 7476 - RNA, 21 nt, RNAi-antisense strand
ugagauuauuacagagcaauu

SEQ ID NO: 7477 - DNA, 21 bp, Homo sapiens
cacatatacagtagcttcctc

SEQ ID NO: 7478 - RNA, 21 nt, RNAi-sense strand
cauauacaguagcuuccucuu

SEQ ID NO: 7479 - RNA, 21 nt, RNAi-antisense strand
gaggaagcuacuguauauguu

SEQ ID NO: 7480 - DNA, 21 bp, Homo sapiens
cactgctgttatatttcatca

SEQ ID NO: 7481 - RNA, 21 nt, RNAi-sense strand
cugcuguuauauuucaucauu

SEQ ID NO: 7482 - RNA, 21 nt, RNAi-antisense strand
ugaugaaauauaacagcaguu

SEQ ID NO: 7483 - DNA, 21 bp, Homo sapiens
catcatgataattcagcaggc

SEQ ID NO: 7484 - RNA, 21 nt, RNAi-sense strand
ucaugauaauucagcaggcuu

SEQ ID NO: 7485 - RNA, 21 nt, RNAi-antisense strand
gccugcugaauuaucaugauu

SEQ ID NO: 7486 - DNA, 21 bp, Homo sapiens
catgataattcagcaggccag

SEQ ID NO: 7487 - RNA, 21 nt, RNAi-sense strand
ugauaauucagcaggccaguu

SEQ ID NO: 7488 - RNA, 21 nt, RNAi-antisense strand
cuggccugcugaauuaucauu

SEQ ID NO: 7489 - DNA, 21 bp, Homo sapiens
caggcttctagtttctcttag

SEQ ID NO: 7490 - RNA, 21 nt, RNAi-sense strand
ggcuucuaguuucucuuaguu

SEQ ID NO: 7491 - RNA, 21 nt, RNAi-antisense strand
cuaagagaaacuagaagccuu

SEQ ID NO: 7492 - DNA, 21 bp, Homo sapiens
cactattgatgagtcttagag

SEQ ID NO: 7493 - RNA, 21 nt, RNAi-sense strand
cuauugaugagucuuagaguu

SEQ ID NO: 7494 - RNA, 21 nt, RNAi-antisense strand
cucuaagacucaucaauaguu

SEQ ID NO: 7495 - DNA, 21 bp, Homo sapiens
cagacacaaagagacaaagct

SEQ ID NO: 7496 - RNA, 21 nt, RNAi-sense strand
gacacaaagagacaaagcuuu

SEQ ID NO: 7497 - RNA, 21 nt, RNAi-antisense strand
agcuuugucucuuugugucuu

SEQ ID NO: 7498 - DNA, 21 bp, Homo sapiens
cacaaagagacaaagctttga

SEQ ID NO: 7499 - RNA, 21 nt, RNAi-sense strand
caaagagacaaagcuuugauu

SEQ ID NO: 7500 - RNA, 21 nt, RNAi-antisense strand
ucaaagcuuugucucuuuguu

SEQ ID NO: 7501 - DNA, 21 bp, Homo sapiens
caaagagacaaagctttgaag

SEQ ID NO: 7502 - RNA, 21 nt, RNAi-sense strand
aagagacaaagcuuugaaguu

SEQ ID NO: 7503 - RNA, 21 nt, RNAi-antisense strand
cuucaaagcuuugucucuuuu

SEQ ID NO: 7504 - DNA, 21 bp, Homo sapiens
caggctactgcttcaatctca

SEQ ID NO: 7505 - RNA, 21 nt, RNAi-sense strand
ggcuacugcuucaaucucauu

SEQ ID NO: 7506 - RNA, 21 nt, RNAi-antisense strand
ugagauugaagcaguagccuu

SEQ ID NO: 7507 - DNA, 21 bp, Homo sapiens
caatctcaattgctttgtaag

SEQ ID NO: 7508 - RNA, 21 nt, RNAi-sense strand
aucucaauugcuuuguaaguu

SEQ ID NO: 7509 - RNA, 21 nt, RNAi-antisense strand
cuuacaaagcaauugagauuu

SEQ ID NO: 7510 - DNA, 21 bp, Homo sapiens
cagagacagacagactatggc

SEQ ID NO: 7511 - RNA, 21 nt, RNAi-sense strand
gagacagacagacuauggcuu

SEQ ID NO: 7512 - RNA, 21 nt, RNAi-antisense strand
gccauagucugucugucucuu

SEQ ID NO: 7513 - DNA, 21 bp, Homo sapiens
cagacagactatggccatggc

SEQ ID NO: 7514 - RNA, 21 nt, RNAi-sense strand
gacagacuauggccauggcuu

SEQ ID NO: 7515 - RNA, 21 nt, RNAi-antisense strand
gccauggccauagucugucuu

SEQ ID NO: 7516 - DNA, 21 bp, Homo sapiens
cagactatggccatggctcac

SEQ ID NO: 7517 - RNA, 21 nt, RNAi-sense strand
gacuauggccauggcucacuu

SEQ ID NO: 7518 - RNA, 21 nt, RNAi-antisense strand
gugagccauggccauagucuu

SEQ ID NO: 7519 - DNA, 21 bp, Homo sapiens
catggctcacatggtttacat

SEQ ID NO: 7520 - RNA, 21 nt, RNAi-sense strand
uggcucacaugguuuacauuu

SEQ ID NO: 7521 - RNA, 21 nt, RNAi-antisense strand
auguaaaccaugugagccauu

SEQ ID NO: 7522 - DNA, 21 bp, Homo sapiens
cacatggtttacatccttcac

SEQ ID NO: 7523 - RNA, 21 nt, RNAi-sense strand
caugguuuacauccuucacuu

SEQ ID NO: 7524 - RNA, 21 nt, RNAi-antisense strand
gugaaggauguaaaccauguu

SEQ ID NO: 7525 - DNA, 21 bp, Homo sapiens
catggtttacatccttcactg

SEQ ID NO: 7526 - RNA, 21 nt, RNAi-sense strand
ugguuuacauccuucacuguu

SEQ ID NO: 7527 - RNA, 21 nt, RNAi-antisense strand
cagugaaggauguaaaccauu

SEQ ID NO: 7528 - DNA, 21 bp, Homo sapiens
catccttcactgctcacgtgt

SEQ ID NO: 7529 - RNA, 21 nt, RNAi-sense strand
uccuucacugcucacguguuu

SEQ ID NO: 7530 - RNA, 21 nt, RNAi-antisense strand
acacgugagcagugaaggauu

SEQ ID NO: 7531 - DNA, 21 bp, Homo sapiens
cactgctcacgtgtttgctgt

SEQ ID NO: 7532 - RNA, 21 nt, RNAi-sense strand
cugcucacguguuugcuguuu

SEQ ID NO: 7533 - RNA, 21 nt, RNAi-antisense strand
acagcaaacacgugagcaguu

SEQ ID NO: 7534 - DNA, 21 bp, Homo sapiens
cacgtgtttgctgtcaagcca

SEQ ID NO: 7535 - RNA, 21 nt, RNAi-sense strand
cguguuugcugucaagccauu

SEQ ID NO: 7536 - RNA, 21 nt, RNAi-antisense strand
uggcuugacagcaaacacguu

SEQ ID NO: 7537 - DNA, 21 bp, Homo sapiens
cagtctgaaactaagatgtgc

SEQ ID NO: 7538 - RNA, 21 nt, RNAi-sense strand
gucugaaacuaagaugugcuu

SEQ ID NO: 7539 - RNA, 21 nt, RNAi-antisense strand
gcacaucuuaguuucagacuu

SEQ ID NO: 7540 - DNA, 21 bp, Homo sapiens
caaggtactatagcggatata

SEQ ID NO: 7541 - RNA, 21 nt, RNAi-sense strand
agguacuauagcggauauauu

SEQ ID NO: 7542 - RNA, 21 nt, RNAi-antisense strand
uauauccgcuauaguaccuuu

SEQ ID NO: 7543 - DNA, 21 bp, Homo sapiens
cagtagttctcaaagtgtggt

SEQ ID NO: 7544 - RNA, 21 nt, RNAi-sense strand
guaguucucaaagugugguuu

SEQ ID NO: 7545 - RNA, 21 nt, RNAi-antisense strand
accacacuuugagaacuacuu

SEQ ID NO: 7546 - DNA, 21 bp, Homo sapiens
caaagtgtggtctctggaaga

SEQ ID NO: 7547 - RNA, 21 nt, RNAi-sense strand
aaguguggucucuggaagauu

SEQ ID NO: 7548 - RNA, 21 nt, RNAi-antisense strand
ucuuccagagaccacacuuuu

SEQ ID NO: 7549 - DNA, 21 bp, Homo sapiens
cactccagacctacagaatca

SEQ ID NO: 7550 - RNA, 21 nt, RNAi-sense strand
cuccagaccuacagaaucauu

SEQ ID NO: 7551 - RNA, 21 nt, RNAi-antisense strand
ugauucuguaggucuggaguu

SEQ ID NO: 7552 - DNA, 21 bp, Homo sapiens
cagacctacagaatcagaaac

SEQ ID NO: 7553 - RNA, 21 nt, RNAi-sense strand
gaccuacagaaucagaaacuu

SEQ ID NO: 7554 - RNA, 21 nt, RNAi-antisense strand
guuucugauucuguaggucuu

SEQ ID NO: 7555 - DNA, 21 bp, Homo sapiens
caccacatgattctgatgtac

SEQ ID NO: 7556 - RNA, 21 nt, RNAi-sense strand
ccacaugauucugauguacuu

SEQ ID NO: 7557 - RNA, 21 nt, RNAi-antisense strand
guacaucagaaucaugugguu

SEQ ID NO: 7558 - DNA, 21 bp, Homo sapiens
cacatgattctgatgtactct

SEQ ID NO: 7559 - RNA, 21 nt, RNAi-sense strand
caugauucugauguacucuuu

SEQ ID NO: 7560 - RNA, 21 nt, RNAi-antisense strand
agaguacaucagaaucauguu

SEQ ID NO: 7561 - DNA, 21 bp, Homo sapiens
catgattctgatgtactctaa

SEQ ID NO: 7562 - RNA, 21 nt, RNAi-sense strand
ugauucugauguacucuaauu

SEQ ID NO: 7563 - RNA, 21 nt, RNAi-antisense strand
uuagaguacaucagaaucauu

SEQ ID NO: 7564 - DNA, 21 bp, Homo sapiens
caatccaagcacactccgcag

SEQ ID NO: 7565 - RNA, 21 nt, RNAi-sense strand
auccaagcacacuccgcaguu

SEQ ID NO: 7566 - RNA, 21 nt, RNAi-antisense strand
cugcggagugugcuuggauuu

SEQ ID NO: 7567 - DNA, 21 bp, Homo sapiens
caagcacactccgcaggcagt

SEQ ID NO: 7568 - RNA, 21 nt, RNAi-sense strand
agcacacuccgcaggcaguuu

SEQ ID NO: 7569 - RNA, 21 nt, RNAi-antisense strand
acugccugcggagugugcuuu

SEQ ID NO: 7570 - DNA, 21 bp, Homo sapiens
cacactccgcaggcagttacc

SEQ ID NO: 7571 - RNA, 21 nt, RNAi-sense strand
cacuccgcaggcaguuaccuu

SEQ ID NO: 7572 - RNA, 21 nt, RNAi-antisense strand
gguaacugccugcggaguguu

SEQ ID NO: 7573 - DNA, 21 bp, Homo sapiens
cactccgcaggcagttaccag

SEQ ID NO: 7574 - RNA, 21 nt, RNAi-sense strand
cuccgcaggcaguuaccaguu

SEQ ID NO: 7575 - RNA, 21 nt, RNAi-antisense strand
cugguaacugccugcggaguu

SEQ ID NO: 7576 - DNA, 21 bp, Homo sapiens
caggcagttaccagtacggct

SEQ ID NO: 7577 - RNA, 21 nt, RNAi-sense strand
ggcaguuaccaguacggcuuu

SEQ ID NO: 7578 - RNA, 21 nt, RNAi-antisense strand
agccguacugguaacugccuu

SEQ ID NO: 7579 - DNA, 21 bp, Homo sapiens
cagttaccagtacggctggct

SEQ ID NO: 7580 - RNA, 21 nt, RNAi-sense strand
guuaccaguacggcuggcuuu

SEQ ID NO: 7581 - RNA, 21 nt, RNAi-antisense strand
agccagccguacugguaacuu

SEQ ID NO: 7582 - DNA, 21 bp, Homo sapiens
cagtacggctggctacaactg

SEQ ID NO: 7583 - RNA, 21 nt, RNAi-sense strand
guacggcuggcuacaacuguu

SEQ ID NO: 7584 - RNA, 21 nt, RNAi-antisense strand
caguuguagccagccguacuu

SEQ ID NO: 7585 - DNA, 21 bp, Homo sapiens
caactgctccatccgtgcctc

SEQ ID NO: 7586 - RNA, 21 nt, RNAi-sense strand
acugcuccauccgugccucuu

SEQ ID NO: 7587 - RNA, 21 nt, RNAi-antisense strand
gaggcacggauggagcaguuu

SEQ ID NO: 7588 - DNA, 21 bp, Homo sapiens
caaactcacaggtgactctaa

SEQ ID NO: 7589 - RNA, 21 nt, RNAi-sense strand
aacucacaggugacucuaauu

SEQ ID NO: 7590 - RNA, 21 nt, RNAi-antisense strand
uuagagucaccugugaguuuu

SEQ ID NO: 7591 - DNA, 21 bp, Homo sapiens
cacaggtgactctaaggttat

SEQ ID NO: 7592 - RNA, 21 nt, RNAi-sense strand
caggugacucuaagguuauuu

SEQ ID NO: 7593 - RNA, 21 nt, RNAi-antisense strand
auaaccuuagagucaccuguu

SEQ ID NO: 7594 - DNA, 21 bp, Homo sapiens
caggtgactctaaggttatct

SEQ ID NO: 7595 - RNA, 21 nt, RNAi-sense strand
ggugacucuaagguuaucuuu

SEQ ID NO: 7596 - RNA, 21 nt, RNAi-antisense strand
agauaaccuuagagucaccuu

SEQ ID NO: 7597 - DNA, 21 bp, Homo sapiens
caaaccactggcctccactca

SEQ ID NO: 7598 - RNA, 21 nt, RNAi-sense strand
aaccacuggccuccacucauu

SEQ ID NO: 7599 - RNA, 21 nt, RNAi-antisense strand
ugaguggaggccagugguuuu

SEQ ID NO: 7600 - DNA, 21 bp, Homo sapiens
cactcaggcctccatcttctc

SEQ ID NO: 7601 - RNA, 21 nt, RNAi-sense strand
cucaggccuccaucuucucuu

SEQ ID NO: 7602 - RNA, 21 nt, RNAi-antisense strand
gagaagauggaggccugaguu

SEQ ID NO: 7603 - DNA, 21 bp, Homo sapiens
caggcctccatcttctcatgc

SEQ ID NO: 7604 - RNA, 21 nt, RNAi-sense strand
ggccuccaucuucucaugcuu

SEQ ID NO: 7605 - RNA, 21 nt, RNAi-antisense strand
gcaugagaagauggaggccuu

SEQ ID NO: 7606 - DNA, 21 bp, Homo sapiens
cagtatttaacttctgaggaa

SEQ ID NO: 7607 - RNA, 21 nt, RNAi-sense strand
guauuuaacuucugaggaauu

SEQ ID NO: 7608 - RNA, 21 nt, RNAi-antisense strand
uuccucagaaguuaaauacuu

SEQ ID NO: 7609 - DNA, 21 bp, Homo sapiens
caatgaagccatatgaaccag

SEQ ID NO: 7610 - RNA, 21 nt, RNAi-sense strand
augaagccauaugaaccaguu

SEQ ID NO: 7611 - RNA, 21 nt, RNAi-antisense strand
cugguucauauggcuucauuu

SEQ ID NO: 7612 - DNA, 21 bp, Homo sapiens
catatgaaccagctgtcagtt

SEQ ID NO: 7613 - RNA, 21 nt, RNAi-sense strand
uaugaaccagcugucaguuuu

SEQ ID NO: 7614 - RNA, 21 nt, RNAi-antisense strand
aacugacagcugguucauauu

SEQ ID NO: 7615 - DNA, 21 bp, Homo sapiens
cagctgtcagttgcacttcta

SEQ ID NO: 7616 - RNA, 21 nt, RNAi-sense strand
gcugucaguugcacuucuauu

SEQ ID NO: 7617 - RNA, 21 nt, RNAi-antisense strand
uagaagugcaacugacagcuu

SEQ ID NO: 7618 - DNA, 21 bp, Homo sapiens
cagttgcacttctaagacttt

SEQ ID NO: 7619 - RNA, 21 nt, RNAi-sense strand
guugcacuucuaagacuuuuu

SEQ ID NO: 7620 - RNA, 21 nt, RNAi-antisense strand
aaagucuuagaagugcaacuu

SEQ ID NO: 7621 - DNA, 21 bp, Homo sapiens
cacttctaagactttacttag

SEQ ID NO: 7622 - RNA, 21 nt, RNAi-sense strand
cuucuaagacuuuacuuaguu

SEQ ID NO: 7623 - RNA, 21 nt, RNAi-antisense strand
cuaaguaaagucuuagaaguu

SEQ ID NO: 7624 - DNA, 21 bp, Homo sapiens
cagtaaattatagctcatgtg

SEQ ID NO: 7625 - RNA, 21 nt, RNAi-sense strand
guaaauuauagcucauguguu

SEQ ID NO: 7626 - RNA, 21 nt, RNAi-antisense strand
cacaugagcuauaauuuacuu

SEQ ID NO: 7627 - DNA, 21 bp, Homo sapiens
catgtgcattatttcagatac

SEQ ID NO: 7628 - RNA, 21 nt, RNAi-sense strand
ugugcauuauuucagauacuu

SEQ ID NO: 7629 - RNA, 21 nt, RNAi-antisense strand
guaucugaaauaaugcacauu

SEQ ID NO: 7630 - DNA, 21 bp, Homo sapiens
cagatacttagcttatgagta

SEQ ID NO: 7631 - RNA, 21 nt, RNAi-sense strand
gauacuuagcuuaugaguauu

SEQ ID NO: 7632 - RNA, 21 nt, RNAi-antisense strand
uacucauaagcuaaguaucuu

SEQ ID NO: 7633 - DNA, 21 bp, Homo sapiens
cacttgattcacagcgtgcat

SEQ ID NO: 7634 - RNA, 21 nt, RNAi-sense strand
cuugauucacagcgugcauuu

SEQ ID NO: 7635 - RNA, 21 nt, RNAi-antisense strand
augcacgcugugaaucaaguu

SEQ ID NO: 7636 - DNA, 21 bp, Homo sapiens
cacagcgtgcatacacagatt

SEQ ID NO: 7637 - RNA, 21 nt, RNAi-sense strand
cagcgugcauacacagauuuu

SEQ ID NO: 7638 - RNA, 21 nt, RNAi-antisense strand
aaucuguguaugcacgcuguu

SEQ ID NO: 7639 - DNA, 21 bp, Homo sapiens
cagcgtgcatacacagattgt

SEQ ID NO: 7640 - RNA, 21 nt, RNAi-sense strand
gcgugcauacacagauuguuu

SEQ ID NO: 7641 - RNA, 21 nt, RNAi-antisense strand
acaaucuguguaugcacgcuu

SEQ ID NO: 7642 - DNA, 21 bp, Homo sapiens
catacacagattgtgagaagt

SEQ ID NO: 7643 - RNA, 21 nt, RNAi-sense strand
uacacagauugugagaaguuu

SEQ ID NO: 7644 - RNA, 21 nt, RNAi-antisense strand
acuucucacaaucuguguauu

SEQ ID NO: 7645 - DNA, 21 bp, Homo sapiens
cacagattgtgagaagtcttc

SEQ ID NO: 7646 - RNA, 21 nt, RNAi-sense strand
cagauugugagaagucuucuu

SEQ ID NO: 7647 - RNA, 21 nt, RNAi-antisense strand
gaagacuucucacaaucuguu

SEQ ID NO: 7648 - DNA, 21 bp, Homo sapiens
cagattgtgagaagtcttcag

SEQ ID NO: 7649 - RNA, 21 nt, RNAi-sense strand
gauugugagaagucuucaguu

SEQ ID NO: 7650 - RNA, 21 nt, RNAi-antisense strand
cugaagacuucucacaaucuu

SEQ ID NO: 7651 - DNA, 21 bp, Homo sapiens
catttgaacttgatggctaac

SEQ ID NO: 7652 - RNA, 21 nt, RNAi-sense strand
uuugaacuugauggcuaacuu

SEQ ID NO: 7653 - RNA, 21 nt, RNAi-antisense strand
guuagccaucaaguucaaauu

SEQ ID NO: 7654 - DNA, 21 bp, Homo sapiens
caaatgtaacttactgcgact

SEQ ID NO: 7655 - RNA, 21 nt, RNAi-sense strand
aauguaacuuacugcgacuuu

SEQ ID NO: 7656 - RNA, 21 nt, RNAi-antisense strand
agucgcaguaaguuacauuuu

SEQ ID NO: 7657 - DNA, 21 bp, Homo sapiens
gacaaaggccagtgcttctgt

SEQ ID NO: 7658 - RNA, 21 nt, RNAi-sense strand
caaaggccagugcuucuguuu

SEQ ID NO: 7659 - RNA, 21 nt, RNAi-antisense strand
acagaagcacuggccuuuguu

SEQ ID NO: 7660 - DNA, 21 bp, Homo sapiens
gaaaggattcacaggtcctga

SEQ ID NO: 7661 - RNA, 21 nt, RNAi-sense strand
aaggauucacagguccugauu

SEQ ID NO: 7662 - RNA, 21 nt, RNAi-antisense strand
ucaggaccugugaauccuuuu

SEQ ID NO: 7663 - DNA, 21 bp, Homo sapiens
gattcacaggtcctgaaggct

SEQ ID NO: 7664 - RNA, 21 nt, RNAi-sense strand
uucacagguccugaaggcuuu

SEQ ID NO: 7665 - RNA, 21 nt, RNAi-antisense strand
agccuucaggaccugugaauu

SEQ ID NO: 7666 - DNA, 21 bp, Homo sapiens
gaataagtggattgccaggat

SEQ ID NO: 7667 - RNA, 21 nt, RNAi-sense strand
auaaguggauugccaggauuu

SEQ ID NO: 7668 - RNA, 21 nt, RNAi-antisense strand
auccuggcaauccacuuauuu

SEQ ID NO: 7669 - DNA, 21 bp, Homo sapiens
gacttgtcggtgtaccaggat

SEQ ID NO: 7670 - RNA, 21 nt, RNAi-sense strand
cuugucgguguaccaggauuu

SEQ ID NO: 7671 - RNA, 21 nt, RNAi-antisense strand
auccugguacaccgacaaguu

SEQ ID NO: 7672 - DNA, 21 bp, Homo sapiens
gagaagatatagaacttgatg

SEQ ID NO: 7673 - RNA, 21 nt, RNAi-sense strand
gaagauauagaacuugauguu

SEQ ID NO: 7674 - RNA, 21 nt, RNAi-antisense strand
caucaaguucuauaucuucuu

SEQ ID NO: 7675 - DNA, 21 bp, Homo sapiens
gaagatatagaacttgatgca

SEQ ID NO: 7676 - RNA, 21 nt, RNAi-sense strand
agauauagaacuugaugcauu

SEQ ID NO: 7677 - RNA, 21 nt, RNAi-antisense strand
ugcaucaaguucuauaucuuu

SEQ ID NO: 7678 - DNA, 21 bp, Homo sapiens
gattctttggctttccaggag

SEQ ID NO: 7679 - RNA, 21 nt, RNAi-sense strand
uucuuuggcuuuccaggaguu

SEQ ID NO: 7680 - RNA, 21 nt, RNAi-antisense strand
cuccuggaaagccaaagaauu

SEQ ID NO: 7681 - DNA, 21 bp, Homo sapiens
gaaagagtgataggacataaa

SEQ ID NO: 7682 - RNA, 21 nt, RNAi-sense strand
aagagugauaggacauaaauu

SEQ ID NO: 7683 - RNA, 21 nt, RNAi-antisense strand
uuuauguccuaucacucuuuu

SEQ ID NO: 7684 - DNA, 21 bp, Homo sapiens
gagtgataggacataaaggag

SEQ ID NO: 7685 - RNA, 21 nt, RNAi-sense strand
gugauaggacauaaaggaguu

SEQ ID NO: 7686 - RNA, 21 nt, RNAi-antisense strand
cuccuuuauguccuaucacuu

SEQ ID NO: 7687 - DNA, 21 bp, Homo sapiens
gataggacataaaggagagcg

SEQ ID NO: 7688 - RNA, 21 nt, RNAi-sense strand
uaggacauaaaggagagcguu

SEQ ID NO: 7689 - RNA, 21 nt, RNAi-antisense strand
cgcucuccuuuauguccuauu

SEQ ID NO: 7690 - DNA, 21 bp, Homo sapiens
gaccaccaggaacagttattg

SEQ ID NO: 7691 - RNA, 21 nt, RNAi-sense strand
ccaccaggaacaguuauuguu

SEQ ID NO: 7692 - RNA, 21 nt, RNAi-antisense strand
caauaacuguuccuggugguu

SEQ ID NO: 7693 - DNA, 21 bp, Homo sapiens
gataacagaacggacctcaag

SEQ ID NO: 7694 - RNA, 21 nt, RNAi-sense strand
uaacagaacggaccucaaguu

SEQ ID NO: 7695 - RNA, 21 nt, RNAi-antisense strand
cuugagguccguucuguuauu

SEQ ID NO: 7696 - DNA, 21 bp, Homo sapiens
gactgcctggagaatcatatg

SEQ ID NO: 7697 - RNA, 21 nt, RNAi-sense strand
cugccuggagaaucauauguu

SEQ ID NO: 7698 - RNA, 21 nt, RNAi-antisense strand
cauaugauucuccaggcaguu

SEQ ID NO: 7699 - DNA, 21 bp, Homo sapiens
gagaatcatatggatctgaaa

SEQ ID NO: 7700 - RNA, 21 nt, RNAi-sense strand
gaaucauauggaucugaaauu

SEQ ID NO: 7701 - RNA, 21 nt, RNAi-antisense strand
uuucagauccauaugauucuu

SEQ ID NO: 7702 - DNA, 21 bp, Homo sapiens
gatttcgtggtccaacagaat

SEQ ID NO: 7703 - RNA, 21 nt, RNAi-sense strand
uuucgugguccaacagaauuu

SEQ ID NO: 7704 - RNA, 21 nt, RNAi-antisense strand
auucuguuggaccacgaaauu

SEQ ID NO: 7705 - DNA, 21 bp, Homo sapiens
gaatattatgacacataccag

SEQ ID NO: 7706 - RNA, 21 nt, RNAi-sense strand
auauuaugacacauaccaguu

SEQ ID NO: 7707 - RNA, 21 nt, RNAi-antisense strand
cugguaugugucauaauauuu

SEQ ID NO: 7708 - DNA, 21 bp, Homo sapiens
gagatgaaggcactccaggcc

SEQ ID NO: 7709 - RNA, 21 nt, RNAi-sense strand
gaugaaggcacuccaggccuu

SEQ ID NO: 7710 - RNA, 21 nt, RNAi-antisense strand
ggccuggagugccuucaucuu

SEQ ID NO: 7711 - DNA, 21 bp, Homo sapiens
gagttcctggaagtcctggat

SEQ ID NO: 7712 - RNA, 21 nt, RNAi-sense strand
guuccuggaaguccuggauuu

SEQ ID NO: 7713 - RNA, 21 nt, RNAi-antisense strand
auccaggacuuccaggaacuu

SEQ ID NO: 7714 - DNA, 21 bp, Homo sapiens
gaagtcctggatcatcaaggc

SEQ ID NO: 7715 - RNA, 21 nt, RNAi-sense strand
aguccuggaucaucaaggcuu

SEQ ID NO: 7716 - RNA, 21 nt, RNAi-antisense strand
gccuugaugauccaggacuuu

SEQ ID NO: 7717 - DNA, 21 bp, Homo sapiens
gatcatcaaggcctggcctca

SEQ ID NO: 7718 - RNA, 21 nt, RNAi-sense strand
ucaucaaggccuggccucauu

SEQ ID NO: 7719 - RNA, 21 nt, RNAi-antisense strand
ugaggccaggccuugaugauu

SEQ ID NO: 7720 - DNA, 21 bp, Homo sapiens
gatggccaggcttgaaaggaa

SEQ ID NO: 7721 - RNA, 21 nt, RNAi-sense strand
uggccaggcuugaaaggaauu

SEQ ID NO: 7722 - RNA, 21 nt, RNAi-antisense strand
uuccuuucaagccuggccauu

SEQ ID NO: 7723 - DNA, 21 bp, Homo sapiens
gaccgccaggtgacatcgttt

SEQ ID NO: 7724 - RNA, 21 nt, RNAi-sense strand
ccgccaggugacaucguuuuu

SEQ ID NO: 7725 - RNA, 21 nt, RNAi-antisense strand
aaacgaugucaccuggcgguu

SEQ ID NO: 7726 - DNA, 21 bp, Homo sapiens
gagatcacggactgccaggct

SEQ ID NO: 7727 - RNA, 21 nt, RNAi-sense strand
gaucacggacugccaggcuuu

SEQ ID NO: 7728 - RNA, 21 nt, RNAi-antisense strand
agccuggcaguccgugaucuu

SEQ ID NO: 7729 - DNA, 21 bp, Homo sapiens
gatcacggactgccaggctat

SEQ ID NO: 7730 - RNA, 21 nt, RNAi-sense strand
ucacggacugccaggcuauuu

SEQ ID NO: 7731 - RNA, 21 nt, RNAi-antisense strand
auagccuggcaguccgugauu

SEQ ID NO: 7732 - DNA, 21 bp, Homo sapiens
gagaaccaggcctcctgtgta

SEQ ID NO: 7733 - RNA, 21 nt, RNAi-sense strand
gaaccaggccuccuguguauu

SEQ ID NO: 7734 - RNA, 21 nt, RNAi-antisense strand
uacacaggaggccugguucuu

SEQ ID NO: 7735 - DNA, 21 bp, Homo sapiens
gaaccaggcctcctgtgtaca

SEQ ID NO: 7736 - RNA, 21 nt, RNAi-sense strand
accaggccuccuguguacauu

SEQ ID NO: 7737 - RNA, 21 nt, RNAi-antisense strand
uguacacaggaggccugguuu

SEQ ID NO: 7738 - DNA, 21 bp, Homo sapiens
gaagacaaggcgcagctggct

SEQ ID NO: 7739 - RNA, 21 nt, RNAi-sense strand
agacaaggcgcagcuggcuuu

SEQ ID NO: 7740 - RNA, 21 nt, RNAi-antisense strand
agccagcugcgccuugucuuu

SEQ ID NO: 7741 - DNA, 21 bp, Homo sapiens
gacaaggcgcagctggcttga

SEQ ID NO: 7742 - RNA, 21 nt, RNAi-sense strand
caaggcgcagcuggcuugauu

SEQ ID NO: 7743 - RNA, 21 nt, RNAi-antisense strand
ucaagccagcugcgccuuguu

SEQ ID NO: 7744 - DNA, 21 bp, Homo sapiens
gaaatacaggtcttccaggat

SEQ ID NO: 7745 - RNA, 21 nt, RNAi-sense strand
aauacaggucuuccaggauuu

SEQ ID NO: 7746 - RNA, 21 nt, RNAi-antisense strand
auccuggaagaccuguauuuu

SEQ ID NO: 7747 - DNA, 21 bp, Homo sapiens
gatggaattcctggaactctg

SEQ ID NO: 7748 - RNA, 21 nt, RNAi-sense strand
uggaauuccuggaacucuguu

SEQ ID NO: 7749 - RNA, 21 nt, RNAi-antisense strand
cagaguuccaggaauuccauu

SEQ ID NO: 7750 - DNA, 21 bp, Homo sapiens
gagtgaaaggattaccaggac

SEQ ID NO: 7751 - RNA, 21 nt, RNAi-sense strand
gugaaaggauuaccaggacuu

SEQ ID NO: 7752 - RNA, 21 nt, RNAi-antisense strand
guccugguaauccuuucacuu

SEQ ID NO: 7753 - DNA, 21 bp, Homo sapiens
gaaaggattaccaggacctaa

SEQ ID NO: 7754 - RNA, 21 nt, RNAi-sense strand
aaggauuaccaggaccuaauu

SEQ ID NO: 7755 - RNA, 21 nt, RNAi-antisense strand
uuagguccugguaauccuuuu

SEQ ID NO: 7756 - DNA, 21 bp, Homo sapiens
gattaccaggacctaaaggcg

SEQ ID NO: 7757 - RNA, 21 nt, RNAi-sense strand
uuaccaggaccuaaaggcguu

SEQ ID NO: 7758 - RNA, 21 nt, RNAi-antisense strand
cgccuuuagguccugguaauu

SEQ ID NO: 7759 - DNA, 21 bp, Homo sapiens
gacctaaaggcgaactggctc

SEQ ID NO: 7760 - RNA, 21 nt, RNAi-sense strand
ccuaaaggcgaacuggcucuu

SEQ ID NO: 7761 - RNA, 21 nt, RNAi-antisense strand
gagccaguucgccuuuagguu

SEQ ID NO: 7762 - DNA, 21 bp, Homo sapiens
gaactggctctgagtggtgag

SEQ ID NO: 7763 - RNA, 21 nt, RNAi-sense strand
acuggcucugaguggugaguu

SEQ ID NO: 7764 - RNA, 21 nt, RNAi-antisense strand
cucaccacucagagccaguuu

SEQ ID NO: 7765 - DNA, 21 bp, Homo sapiens
gagagctcagtgtttcaacac

SEQ ID NO: 7766 - RNA, 21 nt, RNAi-sense strand
gagcucaguguuucaacacuu

SEQ ID NO: 7767 - RNA, 21 nt, RNAi-antisense strand
guguugaaacacugagcucuu

SEQ ID NO: 7768 - DNA, 21 bp, Homo sapiens
gagctcagtgtttcaacacca

SEQ ID NO: 7769 - RNA, 21 nt, RNAi-sense strand
gcucaguguuucaacaccauu

SEQ ID NO: 7770 - RNA, 21 nt, RNAi-antisense strand
ugguguugaaacacugagcuu

SEQ ID NO: 7771 - DNA, 21 bp, Homo sapiens
gaaatgtggagatcctggtct

SEQ ID NO: 7772 - RNA, 21 nt, RNAi-sense strand
aauguggagauccuggucuuu

SEQ ID NO: 7773 - RNA, 21 nt, RNAi-antisense strand
agaccaggaucuccacauuuu

SEQ ID NO: 7774 - DNA, 21 bp, Homo sapiens
gatggtgaaccaggaattcca

SEQ ID NO: 7775 - RNA, 21 nt, RNAi-sense strand
uggugaaccaggaauuccauu

SEQ ID NO: 7776 - RNA, 21 nt, RNAi-antisense strand
uggaauuccugguucaccauu

SEQ ID NO: 7777 - DNA, 21 bp, Homo sapiens
gaaccaggaattccaggaatt

SEQ ID NO: 7778 - RNA, 21 nt, RNAi-sense strand
accaggaauuccaggaauuuu

SEQ ID NO: 7779 - RNA, 21 nt, RNAi-antisense strand
aauuccuggaauuccugguuu

SEQ ID NO: 7780 - DNA, 21 bp, Homo sapiens
gaattccaggaattggatttc

SEQ ID NO: 7781 - RNA, 21 nt, RNAi-sense strand
auuccaggaauuggauuucuu

SEQ ID NO: 7782 - RNA, 21 nt, RNAi-antisense strand
gaaauccaauuccuggaauuu

SEQ ID NO: 7783 - DNA, 21 bp, Homo sapiens
gagaaccagcagtagccatgc

SEQ ID NO: 7784 - RNA, 21 nt, RNAi-sense strand
gaaccagcaguagccaugcuu

SEQ ID NO: 7785 - RNA, 21 nt, RNAi-antisense strand
gcauggcuacugcugguucuu

SEQ ID NO: 7786 - DNA, 21 bp, Homo sapiens
gaaccagcagtagccatgcct

SEQ ID NO: 7787 - RNA, 21 nt, RNAi-sense strand
accagcaguagccaugccuuu

SEQ ID NO: 7788 - RNA, 21 nt, RNAi-antisense strand
aggcauggcuacugcugguuu

SEQ ID NO: 7789 - DNA, 21 bp, Homo sapiens
gaggaccaggaacaccaggtt

SEQ ID NO: 7790 - RNA, 21 nt, RNAi-sense strand
ggaccaggaacaccagguuuu

SEQ ID NO: 7791 - RNA, 21 nt, RNAi-antisense strand
aaccugguguuccugguccuu

SEQ ID NO: 7792 - DNA, 21 bp, Homo sapiens
gaacatggagaaattggactc

SEQ ID NO: 7793 - RNA, 21 nt, RNAi-sense strand
acauggagaaauuggacucuu

SEQ ID NO: 7794 - RNA, 21 nt, RNAi-antisense strand
gaguccaauuucuccauguuu

SEQ ID NO: 7795 - DNA, 21 bp, Homo sapiens
gatggaccacgaggagatcca

SEQ ID NO: 7796 - RNA, 21 nt, RNAi-sense strand
uggaccacgaggagauccauu

SEQ ID NO: 7797 - RNA, 21 nt, RNAi-antisense strand
uggaucuccucgugguccauu

SEQ ID NO: 7798 - DNA, 21 bp, Homo sapiens
gaccacctggagaacaaggac

SEQ ID NO: 7799 - RNA, 21 nt, RNAi-sense strand
ccaccuggagaacaaggacuu

SEQ ID NO: 7800 - RNA, 21 nt, RNAi-antisense strand
guccuuguucuccaggugguu

SEQ ID NO: 7801 - DNA, 21 bp, Homo sapiens
gacttccaggcttaaatggat

SEQ ID NO: 7802 - RNA, 21 nt, RNAi-sense strand
cuuccaggcuuaaauggauuu

SEQ ID NO: 7803 - RNA, 21 nt, RNAi-antisense strand
auccauuuaagccuggaaguu

SEQ ID NO: 7804 - DNA, 21 bp, Homo sapiens
gaattccaggcttggatagat

SEQ ID NO: 7805 - RNA, 21 nt, RNAi-sense strand
auuccaggcuuggauagauuu

SEQ ID NO: 7806 - RNA, 21 nt, RNAi-antisense strand
aucuauccaagccuggaauuu

SEQ ID NO: 7807 - DNA, 21 bp, Homo sapiens
gatagatcaggatttcctgga

SEQ ID NO: 7808 - RNA, 21 nt, RNAi-sense strand
uagaucaggauuuccuggauu

SEQ ID NO: 7809 - RNA, 21 nt, RNAi-antisense strand
uccaggaaauccugaucuauu

SEQ ID NO: 7810 - DNA, 21 bp, Homo sapiens
gatcaggatttcctggagaaa

SEQ ID NO: 7811 - RNA, 21 nt, RNAi-sense strand
ucaggauuuccuggagaaauu

SEQ ID NO: 7812 - RNA, 21 nt, RNAi-antisense strand
uuucuccaggaaauccugauu

SEQ ID NO: 7813 - DNA, 21 bp, Homo sapiens
gatttcctggagaaactggat

SEQ ID NO: 7814 - RNA, 21 nt, RNAi-sense strand
uuuccuggagaaacuggauuu

SEQ ID NO: 7815 - RNA, 21 nt, RNAi-antisense strand
auccaguuucuccaggaaauu

SEQ ID NO: 7816 - DNA, 21 bp, Homo sapiens
gagaaactggatcaccaggaa

SEQ ID NO: 7817 - RNA, 21 nt, RNAi-sense strand
gaaacuggaucaccaggaauu

SEQ ID NO: 7818 - RNA, 21 nt, RNAi-antisense strand
uuccuggugauccaguuucuu

SEQ ID NO: 7819 - DNA, 21 bp, Homo sapiens
gaaactggatcaccaggaatt

SEQ ID NO: 7820 - RNA, 21 nt, RNAi-sense strand
aacuggaucaccaggaauuuu

SEQ ID NO: 7821 - RNA, 21 nt, RNAi-antisense strand
aauuccuggugauccaguuuu

SEQ ID NO: 7822 - DNA, 21 bp, Homo sapiens
gatcaccaggaattccaggtc

SEQ ID NO: 7823 - RNA, 21 nt, RNAi-sense strand
ucaccaggaauuccaggucuu

SEQ ID NO: 7824 - RNA, 21 nt, RNAi-antisense strand
gaccuggaauuccuggugauu

SEQ ID NO: 7825 - DNA, 21 bp, Homo sapiens
gaattccaggtcatcaaggtg

SEQ ID NO: 7826 - RNA, 21 nt, RNAi-sense strand
auuccaggucaucaagguguu

SEQ ID NO: 7827 - RNA, 21 nt, RNAi-antisense strand
caccuugaugaccuggaauuu

SEQ ID NO: 7828 - DNA, 21 bp, Homo sapiens
gaggatatccaggaaatccgg

SEQ ID NO: 7829 - RNA, 21 nt, RNAi-sense strand
ggauauccaggaaauccgguu

SEQ ID NO: 7830 - RNA, 21 nt, RNAi-antisense strand
ccggauuuccuggauauccuu

SEQ ID NO: 7831 - DNA, 21 bp, Homo sapiens
gatttcctggagccattggcc

SEQ ID NO: 7832 - RNA, 21 nt, RNAi-sense strand
uuuccuggagccauuggccuu

SEQ ID NO: 7833 - RNA, 21 nt, RNAi-antisense strand
ggccaauggcuccaggaaauu

SEQ ID NO: 7834 - DNA, 21 bp, Homo sapiens
gaacaaggagataaaggaaat

SEQ ID NO: 7835 - RNA, 21 nt, RNAi-sense strand
acaaggagauaaaggaaauuu

SEQ ID NO: 7836 - RNA, 21 nt, RNAi-antisense strand
auuuccuuuaucuccuuguuu

SEQ ID NO: 7837 - DNA, 21 bp, Homo sapiens
gacaaaggagaaccaggtctc

SEQ ID NO: 7838 - RNA, 21 nt, RNAi-sense strand
caaaggagaaccaggucucuu

SEQ ID NO: 7839 - RNA, 21 nt, RNAi-antisense strand
gagaccugguucuccuuuguu

SEQ ID NO: 7840 - DNA, 21 bp, Homo sapiens
gagaaccaggtctcaaaggat

SEQ ID NO: 7841 - RNA, 21 nt, RNAi-sense strand
gaaccaggucucaaaggauuu

SEQ ID NO: 7842 - RNA, 21 nt, RNAi-antisense strand
auccuuugagaccugguucuu

SEQ ID NO: 7843 - DNA, 21 bp, Homo sapiens
gaaccaggtctcaaaggattc

SEQ ID NO: 7844 - RNA, 21 nt, RNAi-sense strand
accaggucucaaaggauucuu

SEQ ID NO: 7845 - RNA, 21 nt, RNAi-antisense strand
gaauccuuugagaccugguuu

SEQ ID NO: 7846 - DNA, 21 bp, Homo sapiens
gattcgcaggaaatccaggtg

SEQ ID NO: 7847 - RNA, 21 nt, RNAi-sense strand
uucgcaggaaauccagguguu

SEQ ID NO: 7848 - RNA, 21 nt, RNAi-antisense strand
caccuggauuuccugcgaauu

SEQ ID NO: 7849 - DNA, 21 bp, Homo sapiens
gaaatccaggtgagaaaggaa

SEQ ID NO: 7850 - RNA, 21 nt, RNAi-sense strand
aauccaggugagaaaggaauu

SEQ ID NO: 7851 - RNA, 21 nt, RNAi-antisense strand
uuccuuucucaccuggauuuu

SEQ ID NO: 7852 - DNA, 21 bp, Homo sapiens
gagaaaggaaacagaggcgtt

SEQ ID NO: 7853 - RNA, 21 nt, RNAi-sense strand
gaaaggaaacagaggcguuuu

SEQ ID NO: 7854 - RNA, 21 nt, RNAi-antisense strand
aacgccucuguuuccuuucuu

SEQ ID NO: 7855 - DNA, 21 bp, Homo sapiens
gaaaggaaacagaggcgttcc

SEQ ID NO: 7856 - RNA, 21 nt, RNAi-sense strand
aaggaaacagaggcguuccuu

SEQ ID NO: 7857 - RNA, 21 nt, RNAi-antisense strand
ggaacgccucuguuuccuuuu

SEQ ID NO: 7858 - DNA, 21 bp, Homo sapiens
gaatcctggagaaccaggact

SEQ ID NO: 7859 - RNA, 21 nt, RNAi-sense strand
auccuggagaaccaggacuuu

SEQ ID NO: 7860 - RNA, 21 nt, RNAi-antisense strand
aguccugguucuccaggauuu

SEQ ID NO: 7861 - DNA, 21 bp, Homo sapiens
gagaaccaggactccgtggta

SEQ ID NO: 7862 - RNA, 21 nt, RNAi-sense strand
gaaccaggacuccgugguauu

SEQ ID NO: 7863 - RNA, 21 nt, RNAi-antisense strand
uaccacggaguccugguucuu

SEQ ID NO: 7864 - DNA, 21 bp, Homo sapiens
gaaccaggactccgtggtata

SEQ ID NO: 7865 - RNA, 21 nt, RNAi-sense strand
accaggacuccgugguauauu

SEQ ID NO: 7866 - RNA, 21 nt, RNAi-antisense strand
uauaccacggaguccugguuu

SEQ ID NO: 7867 - DNA, 21 bp, Homo sapiens
gactccgtggtataccaggaa

SEQ ID NO: 7868 - RNA, 21 nt, RNAi-sense strand
cuccgugguauaccaggaauu

SEQ ID NO: 7869 - RNA, 21 nt, RNAi-antisense strand
uuccugguauaccacggaguu

SEQ ID NO: 7870 - DNA, 21 bp, Homo sapiens
gagagccaggttattcagaag

SEQ ID NO: 7871 - RNA, 21 nt, RNAi-sense strand
gagccagguuauucagaaguu

SEQ ID NO: 7872 - RNA, 21 nt, RNAi-antisense strand
cuucugaauaaccuggcucuu

SEQ ID NO: 7873 - DNA, 21 bp, Homo sapiens
gagccaggttattcagaaggt

SEQ ID NO: 7874 - RNA, 21 nt, RNAi-sense strand
gccagguuauucagaagguuu

SEQ ID NO: 7875 - RNA, 21 nt, RNAi-antisense strand
accuucugaauaaccuggcuu

SEQ ID NO: 7876 - DNA, 21 bp, Homo sapiens
gaaggtacaaggccaggacca

SEQ ID NO: 7877 - RNA, 21 nt, RNAi-sense strand
agguacaaggccaggaccauu

SEQ ID NO: 7878 - RNA, 21 nt, RNAi-antisense strand
ugguccuggccuuguaccuuu

SEQ ID NO: 7879 - DNA, 21 bp, Homo sapiens
gaagtcctggaagtcctggcc

SEQ ID NO: 7880 - RNA, 21 nt, RNAi-sense strand
aguccuggaaguccuggccuu

SEQ ID NO: 7881 - RNA, 21 nt, RNAi-antisense strand
ggccaggacuuccaggacuuu

SEQ ID NO: 7882 - DNA, 21 bp, Homo sapiens
gaaagccaggtcctcatggtg

SEQ ID NO: 7883 - RNA, 21 nt, RNAi-sense strand
aagccagguccucaugguguu

SEQ ID NO: 7884 - RNA, 21 nt, RNAi-antisense strand
caccaugaggaccuggcuuuu

SEQ ID NO: 7885 - DNA, 21 bp, Homo sapiens
gatttccaggatctcctggac

SEQ ID NO: 7886 - RNA, 21 nt, RNAi-sense strand
uuuccaggaucuccuggacuu

SEQ ID NO: 7887 - RNA, 21 nt, RNAi-antisense strand
guccaggagauccuggaaauu

SEQ ID NO: 7888 - DNA, 21 bp, Homo sapiens
gaggtgaccaaggacgtgatg

SEQ ID NO: 7889 - RNA, 21 nt, RNAi-sense strand
ggugaccaaggacgugauguu

SEQ ID NO: 7890 - RNA, 21 nt, RNAi-antisense strand
caucacguccuuggucaccuu

SEQ ID NO: 7891 - DNA, 21 bp, Homo sapiens
gaccaaggacgtgatggaatt

SEQ ID NO: 7892 - RNA, 21 nt, RNAi-sense strand
ccaaggacgugauggaauuuu

SEQ ID NO: 7893 - RNA, 21 nt, RNAi-antisense strand
aauuccaucacguccuugguu

SEQ ID NO: 7894 - DNA, 21 bp, Homo sapiens
gacgtgatggaattcctggtc

SEQ ID NO: 7895 - RNA, 21 nt, RNAi-sense strand
cgugauggaauuccuggucuu

SEQ ID NO: 7896 - RNA, 21 nt, RNAi-antisense strand
gaccaggaauuccaucacguu

SEQ ID NO: 7897 - DNA, 21 bp, Homo sapiens
gatggaattcctggtccagcc

SEQ ID NO: 7898 - RNA, 21 nt, RNAi-sense strand
uggaauuccugguccagccuu

SEQ ID NO: 7899 - RNA, 21 nt, RNAi-antisense strand
ggcuggaccaggaauuccauu

SEQ ID NO: 7900 - DNA, 21 bp, Homo sapiens
gaattcctggtccagccggag

SEQ ID NO: 7901 - RNA, 21 nt, RNAi-sense strand
auuccugguccagccggaguu

SEQ ID NO: 7902 - RNA, 21 nt, RNAi-antisense strand
cuccggcuggaccaggaauuu

SEQ ID NO: 7903 - DNA, 21 bp, Homo sapiens
gagatgctggacctcgaggac

SEQ ID NO: 7904 - RNA, 21 nt, RNAi-sense strand
gaugcuggaccucgaggacuu

SEQ ID NO: 7905 - RNA, 21 nt, RNAi-antisense strand
guccucgagguccagcaucuu

SEQ ID NO: 7906 - DNA, 21 bp, Homo sapiens
gacaggaaatcgtggtccacc

SEQ ID NO: 7907 - RNA, 21 nt, RNAi-sense strand
caggaaaucgugguccaccuu

SEQ ID NO: 7908 - RNA, 21 nt, RNAi-antisense strand
gguggaccacgauuuccuguu

SEQ ID NO: 7909 - DNA, 21 bp, Homo sapiens
gaaatcgtggtccaccaggct

SEQ ID NO: 7910 - RNA, 21 nt, RNAi-sense strand
aaucgugguccaccaggcuuu

SEQ ID NO: 7911 - RNA, 21 nt, RNAi-antisense strand
agccugguggaccacgauuuu

SEQ ID NO: 7912 - DNA, 21 bp, Homo sapiens
gagtcatgtaataggcataaa

SEQ ID NO: 7913 - RNA, 21 nt, RNAi-sense strand
gucauguaauaggcauaaauu

SEQ ID NO: 7914 - RNA, 21 nt, RNAi-antisense strand
uuuaugccuauuacaugacuu

SEQ ID NO: 7915 - DNA, 21 bp, Homo sapiens
gagcaccaggtactccaggtc

SEQ ID NO: 7916 - RNA, 21 nt, RNAi-sense strand
gcaccagguacuccaggucuu

SEQ ID NO: 7917 - RNA, 21 nt, RNAi-antisense strand
gaccuggaguaccuggugcuu

SEQ ID NO: 7918 - DNA, 21 bp, Homo sapiens
gaggtgatcctggattccagg

SEQ ID NO: 7919 - RNA, 21 nt, RNAi-sense strand
ggugauccuggauuccagguu

SEQ ID NO: 7920 - RNA, 21 nt, RNAi-antisense strand
ccuggaauccaggaucaccuu

SEQ ID NO: 7921 - DNA, 21 bp, Homo sapiens
gatttctaggatccattggac

SEQ ID NO: 7922 - RNA, 21 nt, RNAi-sense strand
uuucuaggauccauuggacuu

SEQ ID NO: 7923 - RNA, 21 nt, RNAi-antisense strand
guccaauggauccuagaaauu

SEQ ID NO: 7924 - DNA, 21 bp, Homo sapiens
gatccattggacctccaggac

SEQ ID NO: 7925 - RNA, 21 nt, RNAi-sense strand
uccauuggaccuccaggacuu

SEQ ID NO: 7926 - RNA, 21 nt, RNAi-antisense strand
guccuggagguccaauggauu

SEQ ID NO: 7927 - DNA, 21 bp, Homo sapiens
gaccacctggtgtacgtggag

SEQ ID NO: 7928 - RNA, 21 nt, RNAi-sense strand
ccaccugguguacguggaguu

SEQ ID NO: 7929 - RNA, 21 nt, RNAi-antisense strand
cuccacguacaccaggugguu

SEQ ID NO: 7930 - DNA, 21 bp, Homo sapiens
gaggtaagccaggcaaggatg

SEQ ID NO: 7931 - RNA, 21 nt, RNAi-sense strand
gguaagccaggcaaggauguu

SEQ ID NO: 7932 - RNA, 21 nt, RNAi-antisense strand
cauccuugccuggcuuaccuu

SEQ ID NO: 7933 - DNA, 21 bp, Homo sapiens
gaactcctggaccagctggag

SEQ ID NO: 7934 - RNA, 21 nt, RNAi-sense strand
acuccuggaccagcuggaguu

SEQ ID NO: 7935 - RNA, 21 nt, RNAi-antisense strand
cuccagcugguccaggaguuu

SEQ ID NO: 7936 - DNA, 21 bp, Homo sapiens
gagagccaggaccagctggat

SEQ ID NO: 7937 - RNA, 21 nt, RNAi-sense strand
gagccaggaccagcuggauuu

SEQ ID NO: 7938 - RNA, 21 nt, RNAi-antisense strand
auccagcugguccuggcucuu

SEQ ID NO: 7939 - DNA, 21 bp, Homo sapiens
gagccaggaccagctggatca

SEQ ID NO: 7940 - RNA, 21 nt, RNAi-sense strand
gccaggaccagcuggaucauu

SEQ ID NO: 7941 - RNA, 21 nt, RNAi-antisense strand
ugauccagcugguccuggcuu

SEQ ID NO: 7942 - DNA, 21 bp, Homo sapiens
gaccagctggatcagatggat

SEQ ID NO: 7943 - RNA, 21 nt, RNAi-sense strand
ccagcuggaucagauggauuu

SEQ ID NO: 7944 - RNA, 21 nt, RNAi-antisense strand
auccaucugauccagcugguu

SEQ ID NO: 7945 - DNA, 21 bp, Homo sapiens
gatcagatggattgccaggtt

SEQ ID NO: 7946 - RNA, 21 nt, RNAi-sense strand
ucagauggauugccagguuuu

SEQ ID NO: 7947 - RNA, 21 nt, RNAi-antisense strand
aaccuggcaauccaucugauu

SEQ ID NO: 7948 - DNA, 21 bp, Homo sapiens
gatggattgccaggtttgaaa

SEQ ID NO: 7949 - RNA, 21 nt, RNAi-sense strand
uggauugccagguuugaaauu

SEQ ID NO: 7950 - RNA, 21 nt, RNAi-antisense strand
uuucaaaccuggcaauccauu

SEQ ID NO: 7951 - DNA, 21 bp, Homo sapiens
gattgccaggtttgaaaggaa

SEQ ID NO: 7952 - RNA, 21 nt, RNAi-sense strand
uugccagguuugaaaggaauu

SEQ ID NO: 7953 - RNA, 21 nt, RNAi-antisense strand
uuccuuucaaaccuggcaauu

SEQ ID NO: 7954 - DNA, 21 bp, Homo sapiens
gagacagtggatcacctgcaa

SEQ ID NO: 7955 - RNA, 21 nt, RNAi-sense strand
gacaguggaucaccugcaauu

SEQ ID NO: 7956 - RNA, 21 nt, RNAi-antisense strand
uugcaggugauccacugucuu

SEQ ID NO: 7957 - DNA, 21 bp, Homo sapiens
gacagtggatcacctgcaacc

SEQ ID NO: 7958 - RNA, 21 nt, RNAi-sense strand
caguggaucaccugcaaccuu

SEQ ID NO: 7959 - RNA, 21 nt, RNAi-antisense strand
gguugcaggugauccacuguu

SEQ ID NO: 7960 - DNA, 21 bp, Homo sapiens
gatcacctgcaacctggacaa

SEQ ID NO: 7961 - RNA, 21 nt, RNAi-sense strand
ucaccugcaaccuggacaauu

SEQ ID NO: 7962 - RNA, 21 nt, RNAi-antisense strand
uuguccagguugcaggugauu

SEQ ID NO: 7963 - DNA, 21 bp, Homo sapiens
gacaacgagaggctttgtctt

SEQ ID NO: 7964 - RNA, 21 nt, RNAi-sense strand
caacgagaggcuuugucuuuu

SEQ ID NO: 7965 - RNA, 21 nt, RNAi-antisense strand
aagacaaagccucucguuguu

SEQ ID NO: 7966 - DNA, 21 bp, Homo sapiens
gacacagtcaaaccacagcaa

SEQ ID NO: 7967 - RNA, 21 nt, RNAi-sense strand
cacagucaaaccacagcaauu

SEQ ID NO: 7968 - RNA, 21 nt, RNAi-antisense strand
uugcugugguuugacuguguu

SEQ ID NO: 7969 - DNA, 21 bp, Homo sapiens
gacagtgccactctacagtgg

SEQ ID NO: 7970 - RNA, 21 nt, RNAi-sense strand
cagugccacucuacagugguu

SEQ ID NO: 7971 - RNA, 21 nt, RNAi-antisense strand
ccacuguagaguggcacuguu

SEQ ID NO: 7972 - DNA, 21 bp, Homo sapiens
gacaagaccttggaactcttg

SEQ ID NO: 7973 - RNA, 21 nt, RNAi-sense strand
caagaccuuggaacucuuguu

SEQ ID NO: 7974 - RNA, 21 nt, RNAi-antisense strand
caagaguuccaaggucuuguu

SEQ ID NO: 7975 - DNA, 21 bp, Homo sapiens
gaccttggaactcttggcagc

SEQ ID NO: 7976 - RNA, 21 nt, RNAi-sense strand
ccuuggaacucuuggcagcuu

SEQ ID NO: 7977 - RNA, 21 nt, RNAi-antisense strand
gcugccaagaguuccaagguu

SEQ ID NO: 7978 - DNA, 21 bp, Homo sapiens
gaactcttggcagctgcctgc

SEQ ID NO: 7979 - RNA, 21 nt, RNAi-sense strand
acucuuggcagcugccugcuu

SEQ ID NO: 7980 - RNA, 21 nt, RNAi-antisense strand
gcaggcagcugccaagaguuu

SEQ ID NO: 7981 - DNA, 21 bp, Homo sapiens
gatttaccacaatgccattct

SEQ ID NO: 7982 - RNA, 21 nt, RNAi-sense strand
uuuaccacaaugccauucuuu

SEQ ID NO: 7983 - RNA, 21 nt, RNAi-antisense strand
agaauggcauugugguaaauu

SEQ ID NO: 7984 - DNA, 21 bp, Homo sapiens
gaaatgattattcatactggc

SEQ ID NO: 7985 - RNA, 21 nt, RNAi-sense strand
aaugauuauucauacuggcuu

SEQ ID NO: 7986 - RNA, 21 nt, RNAi-antisense strand
gccaguaugaauaaucauuuu

SEQ ID NO: 7987 - DNA, 21 bp, Homo sapiens
gattattcatactggctgtca

SEQ ID NO: 7988 - RNA, 21 nt, RNAi-sense strand
uuauucauacuggcugucauu

SEQ ID NO: 7989 - RNA, 21 nt, RNAi-antisense strand
ugacagccaguaugaauaauu

SEQ ID NO: 7990 - DNA, 21 bp, Homo sapiens
gatgccaatgaacatggctcc

SEQ ID NO: 7991 - RNA, 21 nt, RNAi-sense strand
ugccaaugaacauggcuccuu

SEQ ID NO: 7992 - RNA, 21 nt, RNAi-antisense strand
ggagccauguucauuggcauu

SEQ ID NO: 7993 - DNA, 21 bp, Homo sapiens
gagccttatataagcagatgc

SEQ ID NO: 7994 - RNA, 21 nt, RNAi-sense strand
gccuuauauaagcagaugcuu

SEQ ID NO: 7995 - RNA, 21 nt, RNAi-antisense strand
gcaucugcuuauauaaggcuu

SEQ ID NO: 7996 - DNA, 21 bp, Homo sapiens
gatgcactgtttgtgaaggtc

SEQ ID NO: 7997 - RNA, 21 nt, RNAi-sense strand
ugcacuguuugugaaggucuu

SEQ ID NO: 7998 - RNA, 21 nt, RNAi-antisense strand
gaccuucacaaacagugcauu

SEQ ID NO: 7999 - DNA, 21 bp, Homo sapiens
gaaggtcctgcgatcgccata

SEQ ID NO: 8000 - RNA, 21 nt, RNAi-sense strand
agguccugcgaucgccauauu

SEQ ID NO: 8001 - RNA, 21 nt, RNAi-antisense strand
uauggcgaucgcaggaccuuu

SEQ ID NO: 8002 - DNA, 21 bp, Homo sapiens
gatcgccatagccgttcacag

SEQ ID NO: 8003 - RNA, 21 nt, RNAi-sense strand
ucgccauagccguucacaguu

SEQ ID NO: 8004 - RNA, 21 nt, RNAi-antisense strand
cugugaacggcuauggcgauu

SEQ ID NO: 8005 - DNA, 21 bp, Homo sapiens
gacattcctccatgtcctcac

SEQ ID NO: 8006 - RNA, 21 nt, RNAi-sense strand
cauuccuccauguccucacuu

SEQ ID NO: 8007 - RNA, 21 nt, RNAi-antisense strand
gugaggacauggaggaauguu

SEQ ID NO: 8008 - DNA, 21 bp, Homo sapiens
gatttctctctggaaaggatt

SEQ ID NO: 8009 - RNA, 21 nt, RNAi-sense strand
uuucucucuggaaaggauuuu

SEQ ID NO: 8010 - RNA, 21 nt, RNAi-antisense strand
aauccuuuccagagagaaauu

SEQ ID NO: 8011 - DNA, 21 bp, Homo sapiens
gaatgtcatggaagaggaacg

SEQ ID NO: 8012 - RNA, 21 nt, RNAi-sense strand
augucauggaagaggaacguu

SEQ ID NO: 8013 - RNA, 21 nt, RNAi-antisense strand
cguuccucuuccaugacauuu

SEQ ID NO: 8014 - DNA, 21 bp, Homo sapiens
gaagaggaacgtgcaactact

SEQ ID NO: 8015 - RNA, 21 nt, RNAi-sense strand
agaggaacgugcaacuacuuu

SEQ ID NO: 8016 - RNA, 21 nt, RNAi-antisense strand
aguaguugcacguuccucuuu

SEQ ID NO: 8017 - DNA, 21 bp, Homo sapiens
gaggaacgtgcaactactatt

SEQ ID NO: 8018 - RNA, 21 nt, RNAi-sense strand
ggaacgugcaacuacuauuuu

SEQ ID NO: 8019 - RNA, 21 nt, RNAi-antisense strand
aauaguaguugcacguuccuu

SEQ ID NO: 8020 - DNA, 21 bp, Homo sapiens
gaacgtgcaactactattcaa

SEQ ID NO: 8021 - RNA, 21 nt, RNAi-sense strand
acgugcaacuacuauucaauu

SEQ ID NO: 8022 - RNA, 21 nt, RNAi-antisense strand
uugaauaguaguugcacguuu

SEQ ID NO: 8023 - DNA, 21 bp, Homo sapiens
gaaagaatgttcagaaagcct

SEQ ID NO: 8024 - RNA, 21 nt, RNAi-sense strand
aagaauguucagaaagccuuu

SEQ ID NO: 8025 - RNA, 21 nt, RNAi-antisense strand
aggcuuucugaacauucuuuu

SEQ ID NO: 8026 - DNA, 21 bp, Homo sapiens
gaatgttcagaaagcctattc

SEQ ID NO: 8027 - RNA, 21 nt, RNAi-sense strand
auguucagaaagccuauucuu

SEQ ID NO: 8028 - RNA, 21 nt, RNAi-antisense strand
gaauaggcuuucugaacauuu

SEQ ID NO: 8029 - DNA, 21 bp, Homo sapiens
gaaagcctattccatcaactg

SEQ ID NO: 8030 - RNA, 21 nt, RNAi-sense strand
aagccuauuccaucaacuguu

SEQ ID NO: 8031 - RNA, 21 nt, RNAi-antisense strand
caguugauggaauaggcuuuu

SEQ ID NO: 8032 - DNA, 21 bp, Homo sapiens
gaacaaagtaatgacagaaca

SEQ ID NO: 8033 - RNA, 21 nt, RNAi-sense strand
acaaaguaaugacagaacauu

SEQ ID NO: 8034 - RNA, 21 nt, RNAi-antisense strand
uguucugucauuacuuuguuu

SEQ ID NO: 8035 - DNA, 21 bp, Homo sapiens
gacagaacatgctgttattta

SEQ ID NO: 8036 - RNA, 21 nt, RNAi-sense strand
cagaacaugcuguuauuuauu

SEQ ID NO: 8037 - RNA, 21 nt, RNAi-antisense strand
uaaauaacagcauguucuguu

SEQ ID NO: 8038 - DNA, 21 bp, Homo sapiens
gaacatgctgttatttaggta

SEQ ID NO: 8039 - RNA, 21 nt, RNAi-sense strand
acaugcuguuauuuagguauu

SEQ ID NO: 8040 - RNA, 21 nt, RNAi-antisense strand
uaccuaaauaacagcauguuu

SEQ ID NO: 8041 - DNA, 21 bp, Homo sapiens
gatgacttagtacaaagtttc

SEQ ID NO: 8042 - RNA, 21 nt, RNAi-sense strand
ugacuuaguacaaaguuucuu

SEQ ID NO: 8043 - RNA, 21 nt, RNAi-antisense strand
gaaacuuuguacuaagucauu

SEQ ID NO: 8044 - DNA, 21 bp, Homo sapiens
gattgtatgaagtttgaatgc

SEQ ID NO: 8045 - RNA, 21 nt, RNAi-sense strand
uuguaugaaguuugaaugcuu

SEQ ID NO: 8046 - RNA, 21 nt, RNAi-antisense strand
gcauucaaacuucauacaauu

SEQ ID NO: 8047 - DNA, 21 bp, Homo sapiens
gaagtttgaatgctgcacgtt

SEQ ID NO: 8048 - RNA, 21 nt, RNAi-sense strand
aguuugaaugcugcacguuuu

SEQ ID NO: 8049 - RNA, 21 nt, RNAi-antisense strand
aacgugcagcauucaaacuuu

SEQ ID NO: 8050 - DNA, 21 bp, Homo sapiens
gaatgctgcacgttatgaaat

SEQ ID NO: 8051 - RNA, 21 nt, RNAi-sense strand
augcugcacguuaugaaauuu

SEQ ID NO: 8052 - RNA, 21 nt, RNAi-antisense strand
auuucauaacgugcagcauuu

SEQ ID NO: 8053 - DNA, 21 bp, Homo sapiens
gaggctaaatcagtgtttgat

SEQ ID NO: 8054 - RNA, 21 nt, RNAi-sense strand
ggcuaaaucaguguuugauuu

SEQ ID NO: 8055 - RNA, 21 nt, RNAi-antisense strand
aucaaacacugauuuagccuu

SEQ ID NO: 8056 - DNA, 21 bp, Homo sapiens
gagcattgtgtatagaactgg

SEQ ID NO: 8057 - RNA, 21 nt, RNAi-sense strand
gcauuguguauagaacugguu

SEQ ID NO: 8058 - RNA, 21 nt, RNAi-antisense strand
ccaguucuauacacaaugcuu

SEQ ID NO: 8059 - DNA, 21 bp, Homo sapiens
gacctgctgaggaccgtaagg

SEQ ID NO: 8060 - RNA, 21 nt, RNAi-sense strand
ccugcugaggaccguaagguu

SEQ ID NO: 8061 - RNA, 21 nt, RNAi-antisense strand
ccuuacgguccucagcagguu

SEQ ID NO: 8062 - DNA, 21 bp, Homo sapiens
gaggaccgtaaggcctgatgg

SEQ ID NO: 8063 - RNA, 21 nt, RNAi-sense strand
ggaccguaaggccugaugguu

SEQ ID NO: 8064 - RNA, 21 nt, RNAi-antisense strand
ccaucaggccuuacgguccuu

SEQ ID NO: 8065 - DNA, 21 bp, Homo sapiens
gaccgtaaggcctgatggaac

SEQ ID NO: 8066 - RNA, 21 nt, RNAi-sense strand
ccguaaggccugauggaacuu

SEQ ID NO: 8067 - RNA, 21 nt, RNAi-antisense strand
guuccaucaggccuuacgguu

SEQ ID NO: 8068 - DNA, 21 bp, Homo sapiens
gatggaacacagaactgaact

SEQ ID NO: 8069 - RNA, 21 nt, RNAi-sense strand
uggaacacagaacugaacuuu

SEQ ID NO: 8070 - RNA, 21 nt, RNAi-antisense strand
aguucaguucuguguuccauu

SEQ ID NO: 8071 - DNA, 21 bp, Homo sapiens
gaacacagaactgaactgagg

SEQ ID NO: 8072 - RNA, 21 nt, RNAi-sense strand
acacagaacugaacugagguu

SEQ ID NO: 8073 - RNA, 21 nt, RNAi-antisense strand
ccucaguucaguucuguguuu

SEQ ID NO: 8074 - DNA, 21 bp, Homo sapiens
gaactgaactgaggttcatgg

SEQ ID NO: 8075 - RNA, 21 nt, RNAi-sense strand
acugaacugagguucaugguu

SEQ ID NO: 8076 - RNA, 21 nt, RNAi-antisense strand
ccaugaaccucaguucaguuu

SEQ ID NO: 8077 - DNA, 21 bp, Homo sapiens
gaattcattcactgtagctct

SEQ ID NO: 8078 - RNA, 21 nt, RNAi-sense strand
auucauucacuguagcucuuu

SEQ ID NO: 8079 - RNA, 21 nt, RNAi-antisense strand
agagcuacagugaaugaauuu

SEQ ID NO: 8080 - DNA, 21 bp, Homo sapiens
gaaatgtgcactttatcctca

SEQ ID NO: 8081 - RNA, 21 nt, RNAi-sense strand
aaugugcacuuuauccucauu

SEQ ID NO: 8082 - RNA, 21 nt, RNAi-antisense strand
ugaggauaaagugcacauuuu

SEQ ID NO: 8083 - DNA, 21 bp, Homo sapiens
gagcagttcaataatccatga

SEQ ID NO: 8084 - RNA, 21 nt, RNAi-sense strand
gcaguucaauaauccaugauu

SEQ ID NO: 8085 - RNA, 21 nt, RNAi-antisense strand
ucauggauuauugaacugcuu

SEQ ID NO: 8086 - DNA, 21 bp, Homo sapiens
gaaagaacttaaggcatttgt

SEQ ID NO: 8087 - RNA, 21 nt, RNAi-sense strand
aagaacuuaaggcauuuguuu

SEQ ID NO: 8088 - RNA, 21 nt, RNAi-antisense strand
acaaaugccuuaaguucuuuu

SEQ ID NO: 8089 - DNA, 21 bp, Homo sapiens
gaacttaaggcatttgttggt

SEQ ID NO: 8090 - RNA, 21 nt, RNAi-sense strand
acuuaaggcauuuguugguuu

SEQ ID NO: 8091 - RNA, 21 nt, RNAi-antisense strand
accaacaaaugccuuaaguuu

SEQ ID NO: 8092 - DNA, 21 bp, Homo sapiens
gaatatgtcatcactctaggt

SEQ ID NO: 8093 - RNA, 21 nt, RNAi-sense strand
auaugucaucacucuagguuu

SEQ ID NO: 8094 - RNA, 21 nt, RNAi-antisense strand
accuagagugaugacauauuu

SEQ ID NO: 8095 - DNA, 21 bp, Homo sapiens
gataattcagcaggccagtaa

SEQ ID NO: 8096 - RNA, 21 nt, RNAi-sense strand
uaauucagcaggccaguaauu

SEQ ID NO: 8097 - RNA, 21 nt, RNAi-antisense strand
uuacuggccugcugaauuauu

SEQ ID NO: 8098 - DNA, 21 bp, Homo sapiens
gaaactcaggcttctagtttc

SEQ ID NO: 8099 - RNA, 21 nt, RNAi-sense strand
aacucaggcuucuaguuucuu

SEQ ID NO: 8100 - RNA, 21 nt, RNAi-antisense strand
gaaacuagaagccugaguuuu

SEQ ID NO: 8101 - DNA, 21 bp, Homo sapiens
gagaagataaggtctgaataa

SEQ ID NO: 8102 - RNA, 21 nt, RNAi-sense strand
gaagauaaggucugaauaauu

SEQ ID NO: 8103 - RNA, 21 nt, RNAi-antisense strand
uuauucagaccuuaucuucuu

SEQ ID NO: 8104 - DNA, 21 bp, Homo sapiens
gataaggtctgaataatagca

SEQ ID NO: 8105 - RNA, 21 nt, RNAi-sense strand
uaaggucugaauaauagcauu

SEQ ID NO: 8106 - RNA, 21 nt, RNAi-antisense strand
ugcuauuauucagaccuuauu

SEQ ID NO: 8107 - DNA, 21 bp, Homo sapiens
gatgataacactattgatgag

SEQ ID NO: 8108 - RNA, 21 nt, RNAi-sense strand
ugauaacacuauugaugaguu

SEQ ID NO: 8109 - RNA, 21 nt, RNAi-antisense strand
cucaucaauaguguuaucauu

SEQ ID NO: 8110 - DNA, 21 bp, Homo sapiens
gataacactattgatgagtct

SEQ ID NO: 8111 - RNA, 21 nt, RNAi-sense strand
uaacacuauugaugagucuuu

SEQ ID NO: 8112 - RNA, 21 nt, RNAi-antisense strand
agacucaucaauaguguuauu

SEQ ID NO: 8113 - DNA, 21 bp, Homo sapiens
gatgagtcttagagtccagac

SEQ ID NO: 8114 - RNA, 21 nt, RNAi-sense strand
ugagucuuagaguccagacuu

SEQ ID NO: 8115 - RNA, 21 nt, RNAi-antisense strand
gucuggacucuaagacucauu

SEQ ID NO: 8116 - DNA, 21 bp, Homo sapiens
gagtcttagagtccagacaca

SEQ ID NO: 8117 - RNA, 21 nt, RNAi-sense strand
gucuuagaguccagacacauu

SEQ ID NO: 8118 - RNA, 21 nt, RNAi-antisense strand
ugugucuggacucuaagacuu

SEQ ID NO: 8119 - DNA, 21 bp, Homo sapiens
gagtccagacacaaagagaca

SEQ ID NO: 8120 - RNA, 21 nt, RNAi-sense strand
guccagacacaaagagacauu

SEQ ID NO: 8121 - RNA, 21 nt, RNAi-antisense strand
ugucucuuugugucuggacuu

SEQ ID NO: 8122 - DNA, 21 bp, Homo sapiens
gacacaaagagacaaagcttt

SEQ ID NO: 8123 - RNA, 21 nt, RNAi-sense strand
cacaaagagacaaagcuuuuu

SEQ ID NO: 8124 - RNA, 21 nt, RNAi-antisense strand
aaagcuuugucucuuuguguu

SEQ ID NO: 8125 - DNA, 21 bp, Homo sapiens
gagacaaagctttgaagatgc

SEQ ID NO: 8126 - RNA, 21 nt, RNAi-sense strand
gacaaagcuuugaagaugcuu

SEQ ID NO: 8127 - RNA, 21 nt, RNAi-antisense strand
gcaucuucaaagcuuugucuu

SEQ ID NO: 8128 - DNA, 21 bp, Homo sapiens
gacaaagctttgaagatgctt

SEQ ID NO: 8129 - RNA, 21 nt, RNAi-sense strand
caaagcuuugaagaugcuuuu

SEQ ID NO: 8130 - RNA, 21 nt, RNAi-antisense strand
aagcaucuucaaagcuuuguu

SEQ ID NO: 8131 - DNA, 21 bp, Homo sapiens
gatctacctaggtggagttgg

SEQ ID NO: 8132 - RNA, 21 nt, RNAi-sense strand
ucuaccuagguggaguugguu

SEQ ID NO: 8133 - RNA, 21 nt, RNAi-antisense strand
ccaacuccaccuagguagauu

SEQ ID NO: 8134 - DNA, 21 bp, Homo sapiens
gagttggtggtgctgatattt

SEQ ID NO: 8135 - RNA, 21 nt, RNAi-sense strand
guugguggugcugauauuuuu

SEQ ID NO: 8136 - RNA, 21 nt, RNAi-antisense strand
aaauaucagcaccaccaacuu

SEQ ID NO: 8137 - DNA, 21 bp, Homo sapiens
gagacagacagactatggcca

SEQ ID NO: 8138 - RNA, 21 nt, RNAi-sense strand
gacagacagacuauggccauu

SEQ ID NO: 8139 - RNA, 21 nt, RNAi-antisense strand
uggccauagucugucugucuu

SEQ ID NO: 8140 - DNA, 21 bp, Homo sapiens
gacagacagactatggccatg

SEQ ID NO: 8141 - RNA, 21 nt, RNAi-sense strand
cagacagacuauggccauguu

SEQ ID NO: 8142 - RNA, 21 nt, RNAi-antisense strand
cauggccauagucugucuguu

SEQ ID NO: 8143 - DNA, 21 bp, Homo sapiens
gacagactatggccatggctc

SEQ ID NO: 8144 - RNA, 21 nt, RNAi-sense strand
cagacuauggccauggcucuu

SEQ ID NO: 8145 - RNA, 21 nt, RNAi-antisense strand
gagccauggccauagucuguu

SEQ ID NO: 8146 - DNA, 21 bp, Homo sapiens
gactatggccatggctcacat

SEQ ID NO: 8147 - RNA, 21 nt, RNAi-sense strand
cuauggccauggcucacauuu

SEQ ID NO: 8148 - RNA, 21 nt, RNAi-antisense strand
augugagccauggccauaguu

SEQ ID NO: 8149 - DNA, 21 bp, Homo sapiens
gaaactaagatgtgcagcatt

SEQ ID NO: 8150 - RNA, 21 nt, RNAi-sense strand
aacuaagaugugcagcauuuu

SEQ ID NO: 8151 - RNA, 21 nt, RNAi-antisense strand
aaugcugcacaucuuaguuuu

SEQ ID NO: 8152 - DNA, 21 bp, Homo sapiens
gatgtgcagcatttcacttat

SEQ ID NO: 8153 - RNA, 21 nt, RNAi-sense strand
ugugcagcauuucacuuauuu

SEQ ID NO: 8154 - RNA, 21 nt, RNAi-antisense strand
auaagugaaaugcugcacauu

SEQ ID NO: 8155 - DNA, 21 bp, Homo sapiens
gatatagagctagctaatctc

SEQ ID NO: 8156 - RNA, 21 nt, RNAi-sense strand
uauagagcuagcuaaucucuu

SEQ ID NO: 8157 - RNA, 21 nt, RNAi-antisense strand
gagauuagcuagcucuauauu

SEQ ID NO: 8158 - DNA, 21 bp, Homo sapiens
gagctagctaatctctacaaa

SEQ ID NO: 8159 - RNA, 21 nt, RNAi-sense strand
gcuagcuaaucucuacaaauu

SEQ ID NO: 8160 - RNA, 21 nt, RNAi-antisense strand
uuuguagagauuagcuagcuu

SEQ ID NO: 8161 - DNA, 21 bp, Homo sapiens
gaagagcagtatcagcatcat

SEQ ID NO: 8162 - RNA, 21 nt, RNAi-sense strand
agagcaguaucagcaucauuu

SEQ ID NO: 8163 - RNA, 21 nt, RNAi-antisense strand
augaugcugauacugcucuuu

SEQ ID NO: 8164 - DNA, 21 bp, Homo sapiens
gagcagtatcagcatcatctg

SEQ ID NO: 8165 - RNA, 21 nt, RNAi-sense strand
gcaguaucagcaucaucuguu

SEQ ID NO: 8166 - RNA, 21 nt, RNAi-antisense strand
cagaugaugcugauacugcuu

SEQ ID NO: 8167 - DNA, 21 bp, Homo sapiens
gaacttgtcacagatgcagat

SEQ ID NO: 8168 - RNA, 21 nt, RNAi-sense strand
acuugucacagaugcagauuu

SEQ ID NO: 8169 - RNA, 21 nt, RNAi-antisense strand
aucugcaucugugacaaguuu

SEQ ID NO: 8170 - DNA, 21 bp, Homo sapiens
gaccactccagacctacagaa

SEQ ID NO: 8171 - RNA, 21 nt, RNAi-sense strand
ccacuccagaccuacagaauu

SEQ ID NO: 8172 - RNA, 21 nt, RNAi-antisense strand
uucuguaggucuggagugguu

SEQ ID NO: 8173 - DNA, 21 bp, Homo sapiens
gacctacagaatcagaaactc

SEQ ID NO: 8174 - RNA, 21 nt, RNAi-sense strand
ccuacagaaucagaaacucuu

SEQ ID NO: 8175 - RNA, 21 nt, RNAi-antisense strand
gaguuucugauucuguagguu

SEQ ID NO: 8176 - DNA, 21 bp, Homo sapiens
gatgtactctaaatactgaga

SEQ ID NO: 8177 - RNA, 21 nt, RNAi-sense strand
uguacucuaaauacugagauu

SEQ ID NO: 8178 - RNA, 21 nt, RNAi-antisense strand
ucucaguauuuagaguacauu

SEQ ID NO: 8179 - DNA, 21 bp, Homo sapiens
gactctaaggttatctacttt

SEQ ID NO: 8180 - RNA, 21 nt, RNAi-sense strand
cucuaagguuaucuacuuuuu

SEQ ID NO: 8181 - RNA, 21 nt, RNAi-antisense strand
aaaguagauaaccuuagaguu

SEQ ID NO: 8182 - DNA, 21 bp, Homo sapiens
gactggtgctaatgtcaaacc

SEQ ID NO: 8183 - RNA, 21 nt, RNAi-sense strand
cuggugcuaaugucaaaccuu

SEQ ID NO: 8184 - RNA, 21 nt, RNAi-antisense strand
gguuugacauuagcaccaguu

SEQ ID NO: 8185 - DNA, 21 bp, Homo sapiens
gaggaagacaagtgatgctaa

SEQ ID NO: 8186 - RNA, 21 nt, RNAi-sense strand
ggaagacaagugaugcuaauu

SEQ ID NO: 8187 - RNA, 21 nt, RNAi-antisense strand
uuagcaucacuugucuuccuu

SEQ ID NO: 8188 - DNA, 21 bp, Homo sapiens
gaattccaatgaagccatatg

SEQ ID NO: 8189 - RNA, 21 nt, RNAi-sense strand
auuccaaugaagccauauguu

SEQ ID NO: 8190 - RNA, 21 nt, RNAi-antisense strand
cauauggcuucauuggaauuu

SEQ ID NO: 8191 - DNA, 21 bp, Homo sapiens
gaagccatatgaaccagctgt

SEQ ID NO: 8192 - RNA, 21 nt, RNAi-sense strand
agccauaugaaccagcuguuu

SEQ ID NO: 8193 - RNA, 21 nt, RNAi-antisense strand
acagcugguucauauggcuuu

SEQ ID NO: 8194 - DNA, 21 bp, Homo sapiens
gaaccagctgtcagttgcact

SEQ ID NO: 8195 - RNA, 21 nt, RNAi-sense strand
accagcugucaguugcacuuu

SEQ ID NO: 8196 - RNA, 21 nt, RNAi-antisense strand
agugcaacugacagcugguuu

SEQ ID NO: 8197 - DNA, 21 bp, Homo sapiens
gatacttagcttatgagtagc

SEQ ID NO: 8198 - RNA, 21 nt, RNAi-sense strand
uacuuagcuuaugaguagcuu

SEQ ID NO: 8199 - RNA, 21 nt, RNAi-antisense strand
gcuacucauaagcuaaguauu

SEQ ID NO: 8200 - DNA, 21 bp, Homo sapiens
gagtagcttatacaattagtg

SEQ ID NO: 8201 - RNA, 21 nt, RNAi-sense strand
guagcuuauacaauuaguguu

SEQ ID NO: 8202 - RNA, 21 nt, RNAi-antisense strand
cacuaauuguauaagcuacuu

SEQ ID NO: 8203 - DNA, 21 bp, Homo sapiens
gattcacagcgtgcatacaca

SEQ ID NO: 8204 - RNA, 21 nt, RNAi-sense strand
uucacagcgugcauacacauu

SEQ ID NO: 8205 - RNA, 21 nt, RNAi-antisense strand
uguguaugcacgcugugaauu

SEQ ID NO: 8206 - DNA, 21 bp, Homo sapiens
gattgtgagaagtcttcagca

SEQ ID NO: 8207 - RNA, 21 nt, RNAi-sense strand
uugugagaagucuucagcauu

SEQ ID NO: 8208 - RNA, 21 nt, RNAi-antisense strand
ugcugaagacuucucacaauu

SEQ ID NO: 8209 - DNA, 21 bp, Homo sapiens
gagaagtcttcagcaagataa

SEQ ID NO: 8210 - RNA, 21 nt, RNAi-sense strand
gaagucuucagcaagauaauu

SEQ ID NO: 8211 - RNA, 21 nt, RNAi-antisense strand
uuaucuugcugaagacuucuu

SEQ ID NO: 8212 - DNA, 21 bp, Homo sapiens
gaagtcttcagcaagataaac

SEQ ID NO: 8213 - RNA, 21 nt, RNAi-sense strand
agucuucagcaagauaaacuu

SEQ ID NO: 8214 - RNA, 21 nt, RNAi-antisense strand
guuuaucuugcugaagacuuu

SEQ ID NO: 8215 - DNA, 21 bp, Homo sapiens
gaacttgatggctaacttact

SEQ ID NO: 8216 - RNA, 21 nt, RNAi-sense strand
acuugauggcuaacuuacuuu

SEQ ID NO: 8217 - RNA, 21 nt, RNAi-antisense strand
aguaaguuagccaucaaguuu

SEQ ID NO: 8218 - DNA, 21 bp, Homo sapiens
gatggctaacttactaagatt

SEQ ID NO: 8219 - RNA, 21 nt, RNAi-sense strand
uggcuaacuuacuaagauuuu

SEQ ID NO: 8220 - RNA, 21 nt, RNAi-antisense strand
aaucuuaguaaguuagccauu

SEQ ID NO: 8221 - DNA, 21 bp, Homo sapiens
taaagacaaaggccagtgctt

SEQ ID NO: 8222 - RNA, 21 nt, RNAi-sense strand
aagacaaaggccagugcuuuu

SEQ ID NO: 8223 - RNA, 21 nt, RNAi-antisense strand
aagcacuggccuuugucuuuu

SEQ ID NO: 8224 - DNA, 21 bp, Homo sapiens
tacggacttgtcggtgtacca

SEQ ID NO: 8225 - RNA, 21 nt, RNAi-sense strand
cggacuugucgguguaccauu

SEQ ID NO: 8226 - RNA, 21 nt, RNAi-antisense strand
ugguacaccgacaaguccguu

SEQ ID NO: 8227 - DNA, 21 bp, Homo sapiens
taccaggatgcagtggttcta

SEQ ID NO: 8228 - RNA, 21 nt, RNAi-sense strand
ccaggaugcagugguucuauu

SEQ ID NO: 8229 - RNA, 21 nt, RNAi-antisense strand
uagaaccacugcauccugguu

SEQ ID NO: 8230 - DNA, 21 bp, Homo sapiens
tattatgacacataccaggaa

SEQ ID NO: 8231 - RNA, 21 nt, RNAi-sense strand
uuaugacacauaccaggaauu

SEQ ID NO: 8232 - RNA, 21 nt, RNAi-antisense strand
uuccugguaugugucauaauu

SEQ ID NO: 8233 - DNA, 21 bp, Homo sapiens
tacaggtcttccaggatttcc

SEQ ID NO: 8234 - RNA, 21 nt, RNAi-sense strand
caggucuuccaggauuuccuu

SEQ ID NO: 8235 - RNA, 21 nt, RNAi-antisense strand
ggaaauccuggaagaccuguu

SEQ ID NO: 8236 - DNA, 21 bp, Homo sapiens
taccaggacctaaaggcgaac

SEQ ID NO: 8237 - RNA, 21 nt, RNAi-sense strand
ccaggaccuaaaggcgaacuu

SEQ ID NO: 8238 - RNA, 21 nt, RNAi-antisense strand
guucgccuuuagguccugguu

SEQ ID NO: 8239 - DNA, 21 bp, Homo sapiens
taaaggcgaactggctctgag

SEQ ID NO: 8240 - RNA, 21 nt, RNAi-sense strand
aaggcgaacuggcucugaguu

SEQ ID NO: 8241 - RNA, 21 nt, RNAi-antisense strand
cucagagccaguucgccuuuu

SEQ ID NO: 8242 - DNA, 21 bp, Homo sapiens
tacctggaaagccaggcctcc

SEQ ID NO: 8243 - RNA, 21 nt, RNAi-sense strand
ccuggaaagccaggccuccuu

SEQ ID NO: 8244 - RNA, 21 nt, RNAi-antisense strand
ggaggccuggcuuuccagguu

SEQ ID NO: 8245 - DNA, 21 bp, Homo sapiens
tagccatgcctggaggaccag

SEQ ID NO: 8246 - RNA, 21 nt, RNAi-sense strand
gccaugccuggaggaccaguu

SEQ ID NO: 8247 - RNA, 21 nt, RNAi-antisense strand
cugguccuccaggcauggcuu

SEQ ID NO: 8248 - DNA, 21 bp, Homo sapiens
tagatcaggatttcctggaga

SEQ ID NO: 8249 - RNA, 21 nt, RNAi-sense strand
gaucaggauuuccuggagauu

SEQ ID NO: 8250 - RNA, 21 nt, RNAi-antisense strand
ucuccaggaaauccugaucuu

SEQ ID NO: 8251 - DNA, 21 bp, Homo sapiens
tattcagaaggtacaaggcca

SEQ ID NO: 8252 - RNA, 21 nt, RNAi-sense strand
uucagaagguacaaggccauu

SEQ ID NO: 8253 - RNA, 21 nt, RNAi-antisense strand
uggccuuguaccuucugaauu

SEQ ID NO: 8254 - DNA, 21 bp, Homo sapiens
taaaggaatcaaaggcctcct

SEQ ID NO: 8255 - RNA, 21 nt, RNAi-sense strand
aaggaaucaaaggccuccuuu

SEQ ID NO: 8256 - RNA, 21 nt, RNAi-antisense strand
aggaggccuuugauuccuuuu

SEQ ID NO: 8257 - DNA, 21 bp, Homo sapiens
tataagaggtgaccaaggacg

SEQ ID NO: 8258 - RNA, 21 nt, RNAi-sense strand
uaagaggugaccaaggacguu

SEQ ID NO: 8259 - RNA, 21 nt, RNAi-antisense strand
cguccuuggucaccucuuauu

SEQ ID NO: 8260 - DNA, 21 bp, Homo sapiens
taagaggtgaccaaggacgtg

SEQ ID NO: 8261 - RNA, 21 nt, RNAi-sense strand
agaggugaccaaggacguguu

SEQ ID NO: 8262 - RNA, 21 nt, RNAi-antisense strand
cacguccuuggucaccucuuu

SEQ ID NO: 8263 - DNA, 21 bp, Homo sapiens
tactccaggtcttccaggacc

SEQ ID NO: 8264 - RNA, 21 nt, RNAi-sense strand
cuccaggucuuccaggaccuu

SEQ ID NO: 8265 - RNA, 21 nt, RNAi-antisense strand
gguccuggaagaccuggaguu

SEQ ID NO: 8266 - DNA, 21 bp, Homo sapiens
taatcctggatttctaggatc

SEQ ID NO: 8267 - RNA, 21 nt, RNAi-sense strand
auccuggauuucuaggaucuu

SEQ ID NO: 8268 - RNA, 21 nt, RNAi-antisense strand
gauccuagaaauccaggauuu

SEQ ID NO: 8269 - DNA, 21 bp, Homo sapiens
taggatccattggacctccag

SEQ ID NO: 8270 - RNA, 21 nt, RNAi-sense strand
ggauccauuggaccuccaguu

SEQ ID NO: 8271 - RNA, 21 nt, RNAi-antisense strand
cuggagguccaauggauccuu

SEQ ID NO: 8272 - DNA, 21 bp, Homo sapiens
taagccaggcaaggatggaaa

SEQ ID NO: 8273 - RNA, 21 nt, RNAi-sense strand
agccaggcaaggauggaaauu

SEQ ID NO: 8274 - RNA, 21 nt, RNAi-antisense strand
uuuccauccuugccuggcuuu

SEQ ID NO: 8275 - DNA, 21 bp, Homo sapiens
taaaggagagccaggaccagc

SEQ ID NO: 8276 - RNA, 21 nt, RNAi-sense strand
aaggagagccaggaccagcuu

SEQ ID NO: 8277 - RNA, 21 nt, RNAi-antisense strand
gcugguccuggcucuccuuuu

SEQ ID NO: 8278 - DNA, 21 bp, Homo sapiens
taccacaatgccattcttatt

SEQ ID NO: 8279 - RNA, 21 nt, RNAi-sense strand
ccacaaugccauucuuauuuu

SEQ ID NO: 8280 - RNA, 21 nt, RNAi-antisense strand
aauaagaauggcauugugguu

SEQ ID NO: 8281 - DNA, 21 bp, Homo sapiens
tattctgcaatgtcaatgatg

SEQ ID NO: 8282 - RNA, 21 nt, RNAi-sense strand
uucugcaaugucaaugauguu

SEQ ID NO: 8283 - RNA, 21 nt, RNAi-antisense strand
caucauugacauugcagaauu

SEQ ID NO: 8284 - DNA, 21 bp, Homo sapiens
tattcatactggctgtcaaca

SEQ ID NO: 8285 - RNA, 21 nt, RNAi-sense strand
uucauacuggcugucaacauu

SEQ ID NO: 8286 - RNA, 21 nt, RNAi-antisense strand
uguugacagccaguaugaauu

SEQ ID NO: 8287 - DNA, 21 bp, Homo sapiens
tactggctgtcaacaccagct

SEQ ID NO: 8288 - RNA, 21 nt, RNAi-sense strand
cuggcugucaacaccagcuuu

SEQ ID NO: 8289 - RNA, 21 nt, RNAi-antisense strand
agcugguguugacagccaguu

SEQ ID NO: 8290 - DNA, 21 bp, Homo sapiens
tatataagcagatgcactgtt

SEQ ID NO: 8291 - RNA, 21 nt, RNAi-sense strand
uauaagcagaugcacuguuuu

SEQ ID NO: 8292 - RNA, 21 nt, RNAi-antisense strand
aacagugcaucugcuuauauu

SEQ ID NO: 8293 - DNA, 21 bp, Homo sapiens
tataagcagatgcactgtttg

SEQ ID NO: 8294 - RNA, 21 nt, RNAi-sense strand
uaagcagaugcacuguuuguu

SEQ ID NO: 8295 - RNA, 21 nt, RNAi-antisense strand
caaacagugcaucugcuuauu

SEQ ID NO: 8296 - DNA, 21 bp, Homo sapiens
taagcagatgcactgtttgtg

SEQ ID NO: 8297 - RNA, 21 nt, RNAi-sense strand
agcagaugcacuguuuguguu

SEQ ID NO: 8298 - RNA, 21 nt, RNAi-antisense strand
cacaaacagugcaucugcuuu

SEQ ID NO: 8299 - DNA, 21 bp, Homo sapiens
tagccgttcacagccaaacca

SEQ ID NO: 8300 - RNA, 21 nt, RNAi-sense strand
gccguucacagccaaaccauu

SEQ ID NO: 8301 - RNA, 21 nt, RNAi-antisense strand
ugguuuggcugugaacggcuu

SEQ ID NO: 8302 - DNA, 21 bp, Homo sapiens
tagaatgtcatggaagaggaa

SEQ ID NO: 8303 - RNA, 21 nt, RNAi-sense strand
gaaugucauggaagaggaauu

SEQ ID NO: 8304 - RNA, 21 nt, RNAi-antisense strand
uuccucuuccaugacauucuu

SEQ ID NO: 8305 - DNA, 21 bp, Homo sapiens
tacagtttctggctggcttca

SEQ ID NO: 8306 - RNA, 21 nt, RNAi-sense strand
caguuucuggcuggcuucauu

SEQ ID NO: 8307 - RNA, 21 nt, RNAi-antisense strand
ugaagccagccagaaacuguu

SEQ ID NO: 8308 - DNA, 21 bp, Homo sapiens
tattccatcaactgtgaaagc

SEQ ID NO: 8309 - RNA, 21 nt, RNAi-sense strand
uuccaucaacugugaaagcuu

SEQ ID NO: 8310 - RNA, 21 nt, RNAi-antisense strand
gcuuucacaguugauggaauu

SEQ ID NO: 8311 - DNA, 21 bp, Homo sapiens
taataagtcgctgtcaggtgt

SEQ ID NO: 8312 - RNA, 21 nt, RNAi-sense strand
auaagucgcugucagguguuu

SEQ ID NO: 8313 - RNA, 21 nt, RNAi-antisense strand
acaccugacagcgacuuauuu

SEQ ID NO: 8314 - DNA, 21 bp, Homo sapiens
taagtcgctgtcaggtgtgca

SEQ ID NO: 8315 - RNA, 21 nt, RNAi-sense strand
agucgcugucaggugugcauu

SEQ ID NO: 8316 - RNA, 21 nt, RNAi-antisense strand
ugcacaccugacagcgacuuu

SEQ ID NO: 8317 - DNA, 21 bp, Homo sapiens
taatgacagaacatgctgtta

SEQ ID NO: 8318 - RNA, 21 nt, RNAi-sense strand
augacagaacaugcuguuauu

SEQ ID NO: 8319 - RNA, 21 nt, RNAi-antisense strand
uaacagcauguucugucauuu

SEQ ID NO: 8320 - DNA, 21 bp, Homo sapiens
taaccaaacaatattgctcca

SEQ ID NO: 8321 - RNA, 21 nt, RNAi-sense strand
accaaacaauauugcuccauu

SEQ ID NO: 8322 - RNA, 21 nt, RNAi-antisense strand
uggagcaauauuguuugguuu

SEQ ID NO: 8323 - DNA, 21 bp, Homo sapiens
tattgctccatgatgacttag

SEQ ID NO: 8324 - RNA, 21 nt, RNAi-sense strand
uugcuccaugaugacuuaguu

SEQ ID NO: 8325 - RNA, 21 nt, RNAi-antisense strand
cuaagucaucauggagcaauu

SEQ ID NO: 8326 - DNA, 21 bp, Homo sapiens
taatctgtgctgtttcaaagt

SEQ ID NO: 8327 - RNA, 21 nt, RNAi-sense strand
aucugugcuguuucaaaguuu

SEQ ID NO: 8328 - RNA, 21 nt, RNAi-antisense strand
acuuugaaacagcacagauuu

SEQ ID NO: 8329 - DNA, 21 bp, Homo sapiens
tattccacttacatccaaggc

SEQ ID NO: 8330 - RNA, 21 nt, RNAi-sense strand
uuccacuuacauccaaggcuu

SEQ ID NO: 8331 - RNA, 21 nt, RNAi-antisense strand
gccuuggauguaaguggaauu

SEQ ID NO: 8332 - DNA, 21 bp, Homo sapiens
tacatccaaggcactgtcact

SEQ ID NO: 8333 - RNA, 21 nt, RNAi-sense strand
cauccaaggcacugucacuuu

SEQ ID NO: 8334 - RNA, 21 nt, RNAi-antisense strand
agugacagugccuuggauguu

SEQ ID NO: 8335 - DNA, 21 bp, Homo sapiens
tacggtgattgtatgaagttt

SEQ ID NO: 8336 - RNA, 21 nt, RNAi-sense strand
cggugauuguaugaaguuuuu

SEQ ID NO: 8337 - RNA, 21 nt, RNAi-antisense strand
aaacuucauacaaucaccguu

SEQ ID NO: 8338 - DNA, 21 bp, Homo sapiens
tatgaagtttgaatgctgcac

SEQ ID NO: 8339 - RNA, 21 nt, RNAi-sense strand
ugaaguuugaaugcugcacuu

SEQ ID NO: 8340 - RNA, 21 nt, RNAi-antisense strand
gugcagcauucaaacuucauu

SEQ ID NO: 8341 - DNA, 21 bp, Homo sapiens
tatctggagcattgtgtatag

SEQ ID NO: 8342 - RNA, 21 nt, RNAi-sense strand
ucuggagcauuguguauaguu

SEQ ID NO: 8343 - RNA, 21 nt, RNAi-antisense strand
cuauacacaaugcuccagauu

SEQ ID NO: 8344 - DNA, 21 bp, Homo sapiens
taaggcctgatggaacacaga

SEQ ID NO: 8345 - RNA, 21 nt, RNAi-sense strand
aggccugauggaacacagauu

SEQ ID NO: 8346 - RNA, 21 nt, RNAi-antisense strand
ucuguguuccaucaggccuuu

SEQ ID NO: 8347 - DNA, 21 bp, Homo sapiens
taccagcatacgcacacaaat

SEQ ID NO: 8348 - RNA, 21 nt, RNAi-sense strand
ccagcauacgcacacaaauuu

SEQ ID NO: 8349 - RNA, 21 nt, RNAi-antisense strand
auuugugugcguaugcugguu

SEQ ID NO: 8350 - DNA, 21 bp, Homo sapiens
tacgcacacaaataacaagaa

SEQ ID NO: 8351 - RNA, 21 nt, RNAi-sense strand
cgcacacaaauaacaagaauu

SEQ ID NO: 8352 - RNA, 21 nt, RNAi-antisense strand
uucuuguuauuugugugcguu

SEQ ID NO: 8353 - DNA, 21 bp, Homo sapiens
tactacttatgaaatgtgcac

SEQ ID NO: 8354 - RNA, 21 nt, RNAi-sense strand
cuacuuaugaaaugugcacuu

SEQ ID NO: 8355 - RNA, 21 nt, RNAi-antisense strand
gugcacauuucauaaguaguu

SEQ ID NO: 8356 - DNA, 21 bp, Homo sapiens
tatgaaatgtgcactttatcc

SEQ ID NO: 8357 - RNA, 21 nt, RNAi-sense strand
ugaaaugugcacuuuauccuu

SEQ ID NO: 8358 - RNA, 21 nt, RNAi-antisense strand
ggauaaagugcacauuucauu

SEQ ID NO: 8359 - DNA, 21 bp, Homo sapiens
taaatgttggtgcatacctta

SEQ ID NO: 8360 - RNA, 21 nt, RNAi-sense strand
aauguuggugcauaccuuauu

SEQ ID NO: 8361 - RNA, 21 nt, RNAi-antisense strand
uaagguaugcaccaacauuuu

SEQ ID NO: 8362 - DNA, 21 bp, Homo sapiens
taaggcatttgttggtttatc

SEQ ID NO: 8363 - RNA, 21 nt, RNAi-sense strand
aggcauuuguugguuuaucuu

SEQ ID NO: 8364 - RNA, 21 nt, RNAi-antisense strand
gauaaaccaacaaaugccuuu

SEQ ID NO: 8365 - DNA, 21 bp, Homo sapiens
tatcagactcggaatctattt

SEQ ID NO: 8366 - RNA, 21 nt, RNAi-sense strand
ucagacucggaaucuauuuuu

SEQ ID NO: 8367 - RNA, 21 nt, RNAi-antisense strand
aaauagauuccgagucugauu

SEQ ID NO: 8368 - DNA, 21 bp, Homo sapiens
tacaaaccatactgaaagagt

SEQ ID NO: 8369 - RNA, 21 nt, RNAi-sense strand
caaaccauacugaaagaguuu

SEQ ID NO: 8370 - RNA, 21 nt, RNAi-antisense strand
acucuuucaguaugguuuguu

SEQ ID NO: 8371 - DNA, 21 bp, Homo sapiens
tatcaaactgtataacttggc

SEQ ID NO: 8372 - RNA, 21 nt, RNAi-sense strand
ucaaacuguauaacuuggcuu

SEQ ID NO: 8373 - RNA, 21 nt, RNAi-antisense strand
gccaaguuauacaguuugauu

SEQ ID NO: 8374 - DNA, 21 bp, Homo sapiens
tataacttggccgctgtatgt

SEQ ID NO: 8375 - RNA, 21 nt, RNAi-sense strand
uaacuuggccgcuguauguuu

SEQ ID NO: 8376 - RNA, 21 nt, RNAi-antisense strand
acauacagcggccaaguuauu

SEQ ID NO: 8377 - DNA, 21 bp, Homo sapiens
taacttggccgctgtatgtct

SEQ ID NO: 8378 - RNA, 21 nt, RNAi-sense strand
acuuggccgcuguaugucuuu

SEQ ID NO: 8379 - RNA, 21 nt, RNAi-antisense strand
agacauacagcggccaaguuu

SEQ ID NO: 8380 - DNA, 21 bp, Homo sapiens
tatcatgttattcagcaccaa

SEQ ID NO: 8381 - RNA, 21 nt, RNAi-sense strand
ucauguuauucagcaccaauu

SEQ ID NO: 8382 - RNA, 21 nt, RNAi-antisense strand
uuggugcugaauaacaugauu

SEQ ID NO: 8383 - DNA, 21 bp, Homo sapiens
tattcagcaccaagcatgtcc

SEQ ID NO: 8384 - RNA, 21 nt, RNAi-sense strand
uucagcaccaagcauguccuu

SEQ ID NO: 8385 - RNA, 21 nt, RNAi-antisense strand
ggacaugcuuggugcugaauu

SEQ ID NO: 8386 - DNA, 21 bp, Homo sapiens
tactaacctacagagatgcta

SEQ ID NO: 8387 - RNA, 21 nt, RNAi-sense strand
cuaaccuacagagaugcuauu

SEQ ID NO: 8388 - RNA, 21 nt, RNAi-antisense strand
uagcaucucuguagguuaguu

SEQ ID NO: 8389 - DNA, 21 bp, Homo sapiens
taacctacagagatgctaaga

SEQ ID NO: 8390 - RNA, 21 nt, RNAi-sense strand
accuacagagaugcuaagauu

SEQ ID NO: 8391 - RNA, 21 nt, RNAi-antisense strand
ucuuagcaucucuguagguuu

SEQ ID NO: 8392 - DNA, 21 bp, Homo sapiens
taatctcacatatacagtagc

SEQ ID NO: 8393 - RNA, 21 nt, RNAi-sense strand
aucucacauauacaguagcuu

SEQ ID NO: 8394 - RNA, 21 nt, RNAi-antisense strand
gcuacuguauaugugagauuu

SEQ ID NO: 8395 - DNA, 21 bp, Homo sapiens
taattcagcaggccagtaagg

SEQ ID NO: 8396 - RNA, 21 nt, RNAi-sense strand
auucagcaggccaguaagguu

SEQ ID NO: 8397 - RNA, 21 nt, RNAi-antisense strand
ccuuacuggccugcugaauuu

SEQ ID NO: 8398 - DNA, 21 bp, Homo sapiens
taagagaagataaggtctgaa

SEQ ID NO: 8399 - RNA, 21 nt, RNAi-sense strand
agagaagauaaggucugaauu

SEQ ID NO: 8400 - RNA, 21 nt, RNAi-antisense strand
uucagaccuuaucuucucuuu

SEQ ID NO: 8401 - DNA, 21 bp, Homo sapiens
taaggtctgaataatagcaga

SEQ ID NO: 8402 - RNA, 21 nt, RNAi-sense strand
aggucugaauaauagcagauu

SEQ ID NO: 8403 - RNA, 21 nt, RNAi-antisense strand
ucugcuauuauucagaccuuu

SEQ ID NO: 8404 - DNA, 21 bp, Homo sapiens
tattgatgagtcttagagtcc

SEQ ID NO: 8405 - RNA, 21 nt, RNAi-sense strand
uugaugagucuuagaguccuu

SEQ ID NO: 8406 - RNA, 21 nt, RNAi-antisense strand
ggacucuaagacucaucaauu

SEQ ID NO: 8407 - DNA, 21 bp, Homo sapiens
tagagtccagacacaaagaga

SEQ ID NO: 8408 - RNA, 21 nt, RNAi-sense strand
gaguccagacacaaagagauu

SEQ ID NO: 8409 - RNA, 21 nt, RNAi-antisense strand
ucucuuugugucuggacucuu

SEQ ID NO: 8410 - DNA, 21 bp, Homo sapiens
tacctaggtggagttggtggt

SEQ ID NO: 8411 - RNA, 21 nt, RNAi-sense strand
ccuagguggaguuggugguuu

SEQ ID NO: 8412 - RNA, 21 nt, RNAi-antisense strand
accaccaacuccaccuagguu

SEQ ID NO: 8413 - DNA, 21 bp, Homo sapiens
taggtggagttggtggtgctg

SEQ ID NO: 8414 - RNA, 21 nt, RNAi-sense strand
gguggaguugguggugcuguu

SEQ ID NO: 8415 - RNA, 21 nt, RNAi-antisense strand
cagcaccaccaacuccaccuu

SEQ ID NO: 8416 - DNA, 21 bp, Homo sapiens
tatttaaattcaggctactgc

SEQ ID NO: 8417 - RNA, 21 nt, RNAi-sense strand
uuuaaauucaggcuacugcuu

SEQ ID NO: 8418 - RNA, 21 nt, RNAi-antisense strand
gcaguagccugaauuuaaauu

SEQ ID NO: 8419 - DNA, 21 bp, Homo sapiens
taaattcaggctactgcttca

SEQ ID NO: 8420 - RNA, 21 nt, RNAi-sense strand
aauucaggcuacugcuucauu

SEQ ID NO: 8421 - RNA, 21 nt, RNAi-antisense strand
ugaagcaguagccugaauuuu

SEQ ID NO: 8422 - DNA, 21 bp, Homo sapiens
tactgcttcaatctcaattgc

SEQ ID NO: 8423 - RNA, 21 nt, RNAi-sense strand
cugcuucaaucucaauugcuu

SEQ ID NO: 8424 - RNA, 21 nt, RNAi-antisense strand
gcaauugagauugaagcaguu

SEQ ID NO: 8425 - DNA, 21 bp, Homo sapiens
tatggccatggctcacatggt

SEQ ID NO: 8426 - RNA, 21 nt, RNAi-sense strand
uggccauggcucacaugguuu

SEQ ID NO: 8427 - RNA, 21 nt, RNAi-antisense strand
accaugugagccauggccauu

SEQ ID NO: 8428 - DNA, 21 bp, Homo sapiens
tacatccttcactgctcacgt

SEQ ID NO: 8429 - RNA, 21 nt, RNAi-sense strand
cauccuucacugcucacguuu

SEQ ID NO: 8430 - RNA, 21 nt, RNAi-antisense strand
acgugagcagugaaggauguu

SEQ ID NO: 8431 - DNA, 21 bp, Homo sapiens
tacagtctgaaactaagatgt

SEQ ID NO: 8432 - RNA, 21 nt, RNAi-sense strand
cagucugaaacuaagauguuu

SEQ ID NO: 8433 - RNA, 21 nt, RNAi-antisense strand
acaucuuaguuucagacuguu

SEQ ID NO: 8434 - DNA, 21 bp, Homo sapiens
taagatgtgcagcatttcact

SEQ ID NO: 8435 - RNA, 21 nt, RNAi-sense strand
agaugugcagcauuucacuuu

SEQ ID NO: 8436 - RNA, 21 nt, RNAi-antisense strand
agugaaaugcugcacaucuuu

SEQ ID NO: 8437 - DNA, 21 bp, Homo sapiens
tactatagcggatatagagct

SEQ ID NO: 8438 - RNA, 21 nt, RNAi-sense strand
cuauagcggauauagagcuuu

SEQ ID NO: 8439 - RNA, 21 nt, RNAi-antisense strand
agcucuauauccgcuauaguu

SEQ ID NO: 8440 - DNA, 21 bp, Homo sapiens
tatagcggatatagagctagc

SEQ ID NO: 8441 - RNA, 21 nt, RNAi-sense strand
uagcggauauagagcuagcuu

SEQ ID NO: 8442 - RNA, 21 nt, RNAi-antisense strand
gcuagcucuauauccgcuauu

SEQ ID NO: 8443 - DNA, 21 bp, Homo sapiens
tagcggatatagagctagcta

SEQ ID NO: 8444 - RNA, 21 nt, RNAi-sense strand
gcggauauagagcuagcuauu

SEQ ID NO: 8445 - RNA, 21 nt, RNAi-antisense strand
uagcuagcucuauauccgcuu

SEQ ID NO: 8446 - DNA, 21 bp, Homo sapiens
tatagagctagctaatctcta

SEQ ID NO: 8447 - RNA, 21 nt, RNAi-sense strand
uagagcuagcuaaucucuauu

SEQ ID NO: 8448 - RNA, 21 nt, RNAi-antisense strand
uagagauuagcuagcucuauu

SEQ ID NO: 8449 - DNA, 21 bp, Homo sapiens
tagagctagctaatctctaca

SEQ ID NO: 8450 - RNA, 21 nt, RNAi-sense strand
gagcuagcuaaucucuacauu

SEQ ID NO: 8451 - RNA, 21 nt, RNAi-antisense strand
uguagagauuagcuagcucuu

SEQ ID NO: 8452 - DNA, 21 bp, Homo sapiens
taggccagtagttctcaaagt

SEQ ID NO: 8453 - RNA, 21 nt, RNAi-sense strand
ggccaguaguucucaaaguuu

SEQ ID NO: 8454 - RNA, 21 nt, RNAi-antisense strand
acuuugagaacuacuggccuu

SEQ ID NO: 8455 - DNA, 21 bp, Homo sapiens
tagttctcaaagtgtggtctc

SEQ ID NO: 8456 - RNA, 21 nt, RNAi-sense strand
guucucaaaguguggucucuu

SEQ ID NO: 8457 - RNA, 21 nt, RNAi-antisense strand
gagaccacacuuugagaacuu

SEQ ID NO: 8458 - DNA, 21 bp, Homo sapiens
tacagaatcagaaactcttgg

SEQ ID NO: 8459 - RNA, 21 nt, RNAi-sense strand
cagaaucagaaacucuugguu

SEQ ID NO: 8460 - RNA, 21 nt, RNAi-antisense strand
ccaagaguuucugauucuguu

SEQ ID NO: 8461 - DNA, 21 bp, Homo sapiens
tatcaatccaagcacactccg

SEQ ID NO: 8462 - RNA, 21 nt, RNAi-sense strand
ucaauccaagcacacuccguu

SEQ ID NO: 8463 - RNA, 21 nt, RNAi-antisense strand
cggagugugcuuggauugauu

SEQ ID NO: 8464 - DNA, 21 bp, Homo sapiens
taccagtacggctggctacaa

SEQ ID NO: 8465 - RNA, 21 nt, RNAi-sense strand
ccaguacggcuggcuacaauu

SEQ ID NO: 8466 - RNA, 21 nt, RNAi-antisense strand
uuguagccagccguacugguu

SEQ ID NO: 8467 - DNA, 21 bp, Homo sapiens
tacggctggctacaactgctc

SEQ ID NO: 8468 - RNA, 21 nt, RNAi-sense strand
cggcuggcuacaacugcucuu

SEQ ID NO: 8469 - RNA, 21 nt, RNAi-antisense strand
gagcaguuguagccagccguu

SEQ ID NO: 8470 - DNA, 21 bp, Homo sapiens
tacaactgctccatccgtgcc

SEQ ID NO: 8471 - RNA, 21 nt, RNAi-sense strand
caacugcuccauccgugccuu

SEQ ID NO: 8472 - RNA, 21 nt, RNAi-antisense strand
ggcacggauggagcaguuguu

SEQ ID NO: 8473 - DNA, 21 bp, Homo sapiens
taaagttcaaactcacaggtg

SEQ ID NO: 8474 - RNA, 21 nt, RNAi-sense strand
aaguucaaacucacagguguu

SEQ ID NO: 8475 - RNA, 21 nt, RNAi-antisense strand
caccugugaguuugaacuuuu

SEQ ID NO: 8476 - DNA, 21 bp, Homo sapiens
tagactggtgctaatgtcaaa

SEQ ID NO: 8477 - RNA, 21 nt, RNAi-sense strand
gacuggugcuaaugucaaauu

SEQ ID NO: 8478 - RNA, 21 nt, RNAi-antisense strand
uuugacauuagcaccagucuu

SEQ ID NO: 8479 - DNA, 21 bp, Homo sapiens
taatgtcaaaccactggcctc

SEQ ID NO: 8480 - RNA, 21 nt, RNAi-sense strand
augucaaaccacuggccucuu

SEQ ID NO: 8481 - RNA, 21 nt, RNAi-antisense strand
gaggccagugguuugacauuu

SEQ ID NO: 8482 - DNA, 21 bp, Homo sapiens
taccagtatttaacttctgag

SEQ ID NO: 8483 - RNA, 21 nt, RNAi-sense strand
ccaguauuuaacuucugaguu

SEQ ID NO: 8484 - RNA, 21 nt, RNAi-antisense strand
cucagaaguuaaauacugguu

SEQ ID NO: 8485 - DNA, 21 bp, Homo sapiens
tatttaacttctgaggaagac

SEQ ID NO: 8486 - RNA, 21 nt, RNAi-sense strand
uuuaacuucugaggaagacuu

SEQ ID NO: 8487 - RNA, 21 nt, RNAi-antisense strand
gucuuccucagaaguuaaauu

SEQ ID NO: 8488 - DNA, 21 bp, Homo sapiens
taacttctgaggaagacaagt

SEQ ID NO: 8489 - RNA, 21 nt, RNAi-sense strand
acuucugaggaagacaaguuu

SEQ ID NO: 8490 - RNA, 21 nt, RNAi-antisense strand
acuugucuuccucagaaguuu

SEQ ID NO: 8491 - DNA, 21 bp, Homo sapiens
tatgaaccagctgtcagttgc

SEQ ID NO: 8492 - RNA, 21 nt, RNAi-sense strand
ugaaccagcugucaguugcuu

SEQ ID NO: 8493 - RNA, 21 nt, RNAi-antisense strand
gcaacugacagcugguucauu

SEQ ID NO: 8494 - DNA, 21 bp, Homo sapiens
tagctcatgtgcattatttca

SEQ ID NO: 8495 - RNA, 21 nt, RNAi-sense strand
gcucaugugcauuauuucauu

SEQ ID NO: 8496 - RNA, 21 nt, RNAi-antisense strand
ugaaauaaugcacaugagcuu

SEQ ID NO: 8497 - DNA, 21 bp, Homo sapiens
tacttagcttatgagtagctt

SEQ ID NO: 8498 - RNA, 21 nt, RNAi-sense strand
cuuagcuuaugaguagcuuuu

SEQ ID NO: 8499 - RNA, 21 nt, RNAi-antisense strand
aagcuacucauaagcuaaguu

SEQ ID NO: 8500 - DNA, 21 bp, Homo sapiens
tagcttatgagtagcttatac

SEQ ID NO: 8501 - RNA, 21 nt, RNAi-sense strand
gcuuaugaguagcuuauacuu

SEQ ID NO: 8502 - RNA, 21 nt, RNAi-antisense strand
guauaagcuacucauaagcuu

SEQ ID NO: 8503 - DNA, 21 bp, Homo sapiens
tacacagattgtgagaagtct

SEQ ID NO: 8504 - RNA, 21 nt, RNAi-sense strand
cacagauugugagaagucuuu

SEQ ID NO: 8505 - RNA, 21 nt, RNAi-antisense strand
agacuucucacaaucuguguu

SEQ ID NO: 8506 - DNA, 21 bp, Homo sapiens
tacatttgaacttgatggcta

SEQ ID NO: 8507 - RNA, 21 nt, RNAi-sense strand
cauuugaacuugauggcuauu

SEQ ID NO: 8508 - RNA, 21 nt, RNAi-antisense strand
uagccaucaaguucaaauguu

SEQ ID NO: 8509 - DNA, 21 bp, Homo sapiens
tatcaaatgtaacttactgcg

SEQ ID NO: 8510 - RNA, 21 nt, RNAi-sense strand
ucaaauguaacuuacugcguu

SEQ ID NO: 8511 - RNA, 21 nt, RNAi-antisense strand
cgcaguaaguuacauuugauu

SEQ ID NO: 8512 - DNA, 21 bp, Homo sapiens
taacttactgcgactaaactt

SEQ ID NO: 8513 - RNA, 21 nt, RNAi-sense strand
acuuacugcgacuaaacuuuu

SEQ ID NO: 8514 - RNA, 21 nt, RNAi-antisense strand
aaguuuagucgcaguaaguuu

SEQ ID NO: 8515 - DNA, 21 bp, Homo sapiens
aaaggattcacaggtcctgaa

SEQ ID NO: 8516 - RNA, 21 nt, RNAi-sense strand
aggauucacagguccugaauu

SEQ ID NO: 8517 - RNA, 21 nt, RNAi-antisense strand
uucaggaccugugaauccuuu

SEQ ID NO: 8518 - DNA, 21 bp, Homo sapiens
aaggattcacaggtcctgaag

SEQ ID NO: 8519 - RNA, 21 nt, RNAi-sense strand
ggauucacagguccugaaguu

SEQ ID NO: 8520 - RNA, 21 nt, RNAi-antisense strand
cuucaggaccugugaauccuu

SEQ ID NO: 8521 - DNA, 21 bp, Homo sapiens
aaaggattaccaggacctaaa

SEQ ID NO: 8522 - RNA, 21 nt, RNAi-sense strand
aggauuaccaggaccuaaauu

SEQ ID NO: 8523 - RNA, 21 nt, RNAi-antisense strand
uuuagguccugguaauccuuu

SEQ ID NO: 8524 - DNA, 21 bp, Homo sapiens
aattccaggcttggatagatc

SEQ ID NO: 8525 - RNA, 21 nt, RNAi-sense strand
uuccaggcuuggauagaucuu

SEQ ID NO: 8526 - RNA, 21 nt, RNAi-antisense strand
gaucuauccaagccuggaauu

SEQ ID NO: 8527 - DNA, 21 bp, Homo sapiens
aaaggaaacagaggcgttcca

SEQ ID NO: 8528 - RNA, 21 nt, RNAi-sense strand
aggaaacagaggcguuccauu

SEQ ID NO: 8529 - RNA, 21 nt, RNAi-antisense strand
uggaacgccucuguuuccuuu

SEQ ID NO: 8530 - DNA, 21 bp, Homo sapiens
aaggacgtgatggaattcctg

SEQ ID NO: 8531 - RNA, 21 nt, RNAi-sense strand
ggacgugauggaauuccuguu

SEQ ID NO: 8532 - RNA, 21 nt, RNAi-antisense strand
caggaauuccaucacguccuu

SEQ ID NO: 8533 - DNA, 21 bp, Homo sapiens
aatcctggatttctaggatcc

SEQ ID NO: 8534 - RNA, 21 nt, RNAi-sense strand
uccuggauuucuaggauccuu

SEQ ID NO: 8535 - RNA, 21 nt, RNAi-antisense strand
ggauccuagaaauccaggauu

SEQ ID NO: 8536 - DNA, 21 bp, Homo sapiens
aaggcaacaaaggttctaaag

SEQ ID NO: 8537 - RNA, 21 nt, RNAi-sense strand
ggcaacaaagguucuaaaguu

SEQ ID NO: 8538 - RNA, 21 nt, RNAi-antisense strand
cuuuagaaccuuuguugccuu

SEQ ID NO: 8539 - DNA, 21 bp, Homo sapiens
aaggttctaaaggagagccag

SEQ ID NO: 8540 - RNA, 21 nt, RNAi-sense strand
gguucuaaaggagagccaguu

SEQ ID NO: 8541 - RNA, 21 nt, RNAi-antisense strand
cuggcucuccuuuagaaccuu

SEQ ID NO: 8542 - DNA, 21 bp, Homo sapiens
aagaccttggaactcttggca

SEQ ID NO: 8543 - RNA, 21 nt, RNAi-sense strand
gaccuuggaacucuuggcauu

SEQ ID NO: 8544 - RNA, 21 nt, RNAi-antisense strand
ugccaagaguuccaaggucuu

SEQ ID NO: 8545 - DNA, 21 bp, Homo sapiens
aagaggaacgtgcaactacta

SEQ ID NO: 8546 - RNA, 21 nt, RNAi-sense strand
gaggaacgugcaacuacuauu

SEQ ID NO: 8547 - RNA, 21 nt, RNAi-antisense strand
uaguaguugcacguuccucuu

SEQ ID NO: 8548 - DNA, 21 bp, Homo sapiens
cagataacagaacggacctca

SEQ ID NO: 8549 - RNA, 21 nt, RNAi-sense strand
gauaacagaacggaccucauu

SEQ ID NO: 8550 - RNA, 21 nt, RNAi-antisense strand
ugagguccguucuguuaucuu

SEQ ID NO: 8551 - DNA, 21 bp, Homo sapiens
caggatttcgtggtccaacag

SEQ ID NO: 8552 - RNA, 21 nt, RNAi-sense strand
ggauuucgugguccaacaguu

SEQ ID NO: 8553 - RNA, 21 nt, RNAi-antisense strand
cuguuggaccacgaaauccuu

SEQ ID NO: 8554 - DNA, 21 bp, Homo sapiens
caggaattccaggtcatcaag

SEQ ID NO: 8555 - RNA, 21 nt, RNAi-sense strand
ggaauuccaggucaucaaguu

SEQ ID NO: 8556 - RNA, 21 nt, RNAi-antisense strand
cuugaugaccuggaauuccuu

SEQ ID NO: 8557 - DNA, 21 bp, Homo sapiens
caaggacgtgatggaattcct

SEQ ID NO: 8558 - RNA, 21 nt, RNAi-sense strand
aggacgugauggaauuccuuu

SEQ ID NO: 8559 - RNA, 21 nt, RNAi-antisense strand
aggaauuccaucacguccuuu

SEQ ID NO: 8560 - DNA, 21 bp, Homo sapiens
cagacaggaaatcgtggtcca

SEQ ID NO: 8561 - RNA, 21 nt, RNAi-sense strand
gacaggaaaucgugguccauu

SEQ ID NO: 8562 - RNA, 21 nt, RNAi-antisense strand
uggaccacgauuuccugucuu

SEQ ID NO: 8563 - DNA, 21 bp, Homo sapiens
cagaggtgatcctggattcca

SEQ ID NO: 8564 - RNA, 21 nt, RNAi-sense strand
gaggugauccuggauuccauu

SEQ ID NO: 8565 - RNA, 21 nt, RNAi-antisense strand
uggaauccaggaucaccucuu

SEQ ID NO: 8566 - DNA, 21 bp, Homo sapiens
cagatggattgccaggtttga

SEQ ID NO: 8567 - RNA, 21 nt, RNAi-sense strand
gauggauugccagguuugauu

SEQ ID NO: 8568 - RNA, 21 nt, RNAi-antisense strand
ucaaaccuggcaauccaucuu

SEQ ID NO: 8569 - DNA, 21 bp, Homo sapiens
caaaccacagcaattccttca

SEQ ID NO: 8570 - RNA, 21 nt, RNAi-sense strand
aaccacagcaauuccuucauu

SEQ ID NO: 8571 - RNA, 21 nt, RNAi-antisense strand
ugaaggaauugcugugguuuu

SEQ ID NO: 8572 - DNA, 21 bp, Homo sapiens
cacggacaagaccttggaact

SEQ ID NO: 8573 - RNA, 21 nt, RNAi-sense strand
cggacaagaccuuggaacuuu

SEQ ID NO: 8574 - RNA, 21 nt, RNAi-antisense strand
aguuccaaggucuuguccguu

SEQ ID NO: 8575 - DNA, 21 bp, Homo sapiens
caagaccttggaactcttggc

SEQ ID NO: 8576 - RNA, 21 nt, RNAi-sense strand
agaccuuggaacucuuggcuu

SEQ ID NO: 8577 - RNA, 21 nt, RNAi-antisense strand
gccaagaguuccaaggucuuu

SEQ ID NO: 8578 - DNA, 21 bp, Homo sapiens
cacaatgccattcttattctg

SEQ ID NO: 8579 - RNA, 21 nt, RNAi-sense strand
caaugccauucuuauucuguu

SEQ ID NO: 8580 - RNA, 21 nt, RNAi-antisense strand
cagaauaagaauggcauuguu

SEQ ID NO: 8581 - DNA, 21 bp, Homo sapiens
caatgccattcttattctgca

SEQ ID NO: 8582 - RNA, 21 nt, RNAi-sense strand
augccauucuuauucugcauu

SEQ ID NO: 8583 - RNA, 21 nt, RNAi-antisense strand
ugcagaauaagaauggcauuu

SEQ ID NO: 8584 - DNA, 21 bp, Homo sapiens
cagctctgatgccaatgaaca

SEQ ID NO: 8585 - RNA, 21 nt, RNAi-sense strand
gcucugaugccaaugaacauu

SEQ ID NO: 8586 - RNA, 21 nt, RNAi-antisense strand
uguucauuggcaucagagcuu

SEQ ID NO: 8587 - DNA, 21 bp, Homo sapiens
cagccaaaccactgacattcc

SEQ ID NO: 8588 - RNA, 21 nt, RNAi-sense strand
gccaaaccacugacauuccuu

SEQ ID NO: 8589 - RNA, 21 nt, RNAi-antisense strand
ggaaugucagugguuuggcuu

SEQ ID NO: 8590 - DNA, 21 bp, Homo sapiens
catgtcctcacggctggattt

SEQ ID NO: 8591 - RNA, 21 nt, RNAi-sense strand
uguccucacggcuggauuuuu

SEQ ID NO: 8592 - RNA, 21 nt, RNAi-antisense strand
aaauccagccgugaggacauu

SEQ ID NO: 8593 - DNA, 21 bp, Homo sapiens
cattcatcatgttcacaagtg

SEQ ID NO: 8594 - RNA, 21 nt, RNAi-sense strand
uucaucauguucacaaguguu

SEQ ID NO: 8595 - RNA, 21 nt, RNAi-antisense strand
cacuugugaacaugaugaauu

SEQ ID NO: 8596 - DNA, 21 bp, Homo sapiens
catggaagaggaacgtgcaac

SEQ ID NO: 8597 - RNA, 21 nt, RNAi-sense strand
uggaagaggaacgugcaacuu

SEQ ID NO: 8598 - RNA, 21 nt, RNAi-antisense strand
guugcacguuccucuuccauu

SEQ ID NO: 8599 - DNA, 21 bp, Homo sapiens
gaaaggattcacaggtcctga

SEQ ID NO: 8600 - RNA, 21 nt, RNAi-sense strand
aaggauucacagguccugauu

SEQ ID NO: 8601 - RNA, 21 nt, RNAi-antisense strand
ucaggaccugugaauccuuuu

SEQ ID NO: 8602 - DNA, 21 bp, Homo sapiens
gattcacaggtcctgaaggct

SEQ ID NO: 8603 - RNA, 21 nt, RNAi-sense strand
uucacagguccugaaggcuuu

SEQ ID NO: 8604 - RNA, 21 nt, RNAi-antisense strand
agccuucaggaccugugaauu

SEQ ID NO: 8605 - DNA, 21 bp, Homo sapiens
gacttgtcggtgtaccaggat

SEQ ID NO: 8606 - RNA, 21 nt, RNAi-sense strand
cuugucgguguaccaggauuu

SEQ ID NO: 8607 - RNA, 21 nt, RNAi-antisense strand
auccugguacaccgacaaguu

SEQ ID NO: 8608 - DNA, 21 bp, Homo sapiens
gataacagaacggacctcaag

SEQ ID NO: 8609 - RNA, 21 nt, RNAi-sense strand
uaacagaacggaccucaaguu

SEQ ID NO: 8610 - RNA, 21 nt, RNAi-antisense strand
cuugagguccguucuguuauu

SEQ ID NO: 8611 - DNA, 21 bp, Homo sapiens
gactgcctggagaatcatatg

SEQ ID NO: 8612 - RNA, 21 nt, RNAi-sense strand
cugccuggagaaucauauguu

SEQ ID NO: 8613 - RNA, 21 nt, RNAi-antisense strand
cauaugauucuccaggcaguu

SEQ ID NO: 8614 - DNA, 21 bp, Homo sapiens
gatttcgtggtccaacagaat

SEQ ID NO: 8615 - RNA, 21 nt, RNAi-sense strand
uuucgugguccaacagaauuu

SEQ ID NO: 8616 - RNA, 21 nt, RNAi-antisense strand
auucuguuggaccacgaaauu

SEQ ID NO: 8617 - DNA, 21 bp, Homo sapiens
gatggccaggcttgaaaggaa

SEQ ID NO: 8618 - RNA, 21 nt, RNAi-sense strand
uggccaggcuugaaaggaauu

SEQ ID NO: 8619 - RNA, 21 nt, RNAi-antisense strand
uuccuuucaagccuggccauu

SEQ ID NO: 8620 - DNA, 21 bp, Homo sapiens
gaaaggattaccaggacctaa

SEQ ID NO: 8621 - RNA, 21 nt, RNAi-sense strand
aaggauuaccaggaccuaauu

SEQ ID NO: 8622 - RNA, 21 nt, RNAi-antisense strand
uuagguccugguaauccuuuu

SEQ ID NO: 8623 - DNA, 21 bp, Homo sapiens
gattaccaggacctaaaggcg

SEQ ID NO: 8624 - RNA, 21 nt, RNAi-sense strand
uuaccaggaccuaaaggcguu

SEQ ID NO: 8625 - RNA, 21 nt, RNAi-antisense strand
cgccuuuagguccugguaauu

SEQ ID NO: 8626 - DNA, 21 bp, Homo sapiens
gaattccaggcttggatagat

SEQ ID NO: 8627 - RNA, 21 nt, RNAi-sense strand
auuccaggcuuggauagauuu

SEQ ID NO: 8628 - RNA, 21 nt, RNAi-antisense strand
aucuauccaagccuggaauuu

SEQ ID NO: 8629 - DNA, 21 bp, Homo sapiens
gaaaggaaacagaggcgttcc

SEQ ID NO: 8630 - RNA, 21 nt, RNAi-sense strand
aaggaaacagaggcguuccuu

SEQ ID NO: 8631 - RNA, 21 nt, RNAi-antisense strand
ggaacgccucuguuuccuuuu

SEQ ID NO: 8632 - DNA, 21 bp, Homo sapiens
gaaccaggactccgtggtata

SEQ ID NO: 8633 - RNA, 21 nt, RNAi-sense strand
accaggacuccgugguauauu

SEQ ID NO: 8634 - RNA, 21 nt, RNAi-antisense strand
uauaccacggaguccugguuu

SEQ ID NO: 8635 - DNA, 21 bp, Homo sapiens
gaccaaggacgtgatggaatt

SEQ ID NO: 8636 - RNA, 21 nt, RNAi-sense strand
ccaaggacgugauggaauuuu

SEQ ID NO: 8637 - RNA, 21 nt, RNAi-antisense strand
aauuccaucacguccuugguu

SEQ ID NO: 8638 - DNA, 21 bp, Homo sapiens
gacgtgatggaattcctggtc

SEQ ID NO: 8639 - RNA, 21 nt, RNAi-sense strand
cgugauggaauuccuggucuu

SEQ ID NO: 8640 - RNA, 21 nt, RNAi-antisense strand
gaccaggaauuccaucacguu

SEQ ID NO: 8641 - DNA, 21 bp, Homo sapiens
gatggattgccaggtttgaaa

SEQ ID NO: 8642 - RNA, 21 nt, RNAi-sense strand
uggauugccagguuugaaauu

SEQ ID NO: 8643 - RNA, 21 nt, RNAi-antisense strand
uuucaaaccuggcaauccauu

SEQ ID NO: 8644 - DNA, 21 bp, Homo sapiens
gattgccaggtttgaaaggaa

SEQ ID NO: 8645 - RNA, 21 nt, RNAi-sense strand
uugccagguuugaaaggaauu

SEQ ID NO: 8646 - RNA, 21 nt, RNAi-antisense strand
uuccuuucaaaccuggcaauu

SEQ ID NO: 8647 - DNA, 21 bp, Homo sapiens
gacaacgagaggctttgtctt

SEQ ID NO: 8648 - RNA, 21 nt, RNAi-sense strand
caacgagaggcuuugucuuuu

SEQ ID NO: 8649 - RNA, 21 nt, RNAi-antisense strand
aagacaaagccucucguuguu

SEQ ID NO: 8650 - DNA, 21 bp, Homo sapiens
gacaagaccttggaactcttg

SEQ ID NO: 8651 - RNA, 21 nt, RNAi-sense strand
caagaccuuggaacucuuguu

SEQ ID NO: 8652 - RNA, 21 nt, RNAi-antisense strand
caagaguuccaaggucuuguu

SEQ ID NO: 8653 - DNA, 21 bp, Homo sapiens
gaagaggaacgtgcaactact

SEQ ID NO: 8654 - RNA, 21 nt, RNAi-sense strand
agaggaacgugcaacuacuuu

SEQ ID NO: 8655 - RNA, 21 nt, RNAi-antisense strand
aguaguugcacguuccucuuu

SEQ ID NO: 8656 - DNA, 21 bp, Homo sapiens
gaggaacgtgcaactactatt

SEQ ID NO: 8657 - RNA, 21 nt, RNAi-sense strand
ggaacgugcaacuacuauuuu

SEQ ID NO: 8658 - RNA, 21 nt, RNAi-antisense strand
aauaguaguugcacguuccuu

SEQ ID NO: 8659 - DNA, 21 bp, Homo sapiens
tattcagaaggtacaaggcca

SEQ ID NO: 8660 - RNA, 21 nt, RNAi-sense strand
uucagaagguacaaggccauu

SEQ ID NO: 8661 - RNA, 21 nt, RNAi-antisense strand
uggccuuguaccuucugaauu

SEQ ID NO: 8662 - DNA, 21 bp, Homo sapiens
taccacaatgccattcttatt

SEQ ID NO: 8663 - RNA, 21 nt, RNAi-sense strand
ccacaaugccauucuuauuuu

SEQ ID NO: 8664 - RNA, 21 nt, RNAi-antisense strand
aauaagaauggcauugugguu

SEQ ID NO: 8665 - DNA, 21 bp, Homo sapiens
aaagacaaaggccagtgcttc

SEQ ID NO: 8666 - RNA, 21 nt, RNAi-sense strand
agacaaaggccagugcuucuu

SEQ ID NO: 8667 - RNA, 21 nt, RNAi-antisense strand
gaagcacuggccuuugucuuu

SEQ ID NO: 8668 - DNA, 21 bp, Homo sapiens
aagacaaaggccagtgcttct

SEQ ID NO: 8669 - RNA, 21 nt, RNAi-sense strand
gacaaaggccagugcuucuuu

SEQ ID NO: 8670 - RNA, 21 nt, RNAi-antisense strand
agaagcacuggccuuugucuu

SEQ ID NO: 8671 - DNA, 21 bp, Homo sapiens
aaaggccagtgcttctgtgac

SEQ ID NO: 8672 - RNA, 21 nt, RNAi-sense strand
aggccagugcuucugugacuu

SEQ ID NO: 8673 - RNA, 21 nt, RNAi-antisense strand
gucacagaagcacuggccuuu

SEQ ID NO: 8674 - DNA, 21 bp, Homo sapiens
aaggccagtgcttctgtgacg

SEQ ID NO: 8675 - RNA, 21 nt, RNAi-sense strand
ggccagugcuucugugacguu

SEQ ID NO: 8676 - RNA, 21 nt, RNAi-antisense strand
cgucacagaagcacuggccuu

SEQ ID NO: 8677 - DNA, 21 bp, Homo sapiens
aaaggattcacaggtcctgaa

SEQ ID NO: 8678 - RNA, 21 nt, RNAi-sense strand
aggauucacagguccugaauu

SEQ ID NO: 8679 - RNA, 21 nt, RNAi-antisense strand
uucaggaccugugaauccuuu

SEQ ID NO: 8680 - DNA, 21 bp, Homo sapiens
aaggattcacaggtcctgaag

SEQ ID NO: 8681 - RNA, 21 nt, RNAi-sense strand
ggauucacagguccugaaguu

SEQ ID NO: 8682 - RNA, 21 nt, RNAi-antisense strand
cuucaggaccugugaauccuu

SEQ ID NO: 8683 - DNA, 21 bp, Homo sapiens
aataagtggattgccaggatt

SEQ ID NO: 8684 - RNA, 21 nt, RNAi-sense strand
uaaguggauugccaggauuuu

SEQ ID NO: 8685 - RNA, 21 nt, RNAi-antisense strand
aauccuggcaauccacuuauu

SEQ ID NO: 8686 - DNA, 21 bp, Homo sapiens
aaggagaagatatagaacttg

SEQ ID NO: 8687 - RNA, 21 nt, RNAi-sense strand
ggagaagauauagaacuuguu

SEQ ID NO: 8688 - RNA, 21 nt, RNAi-antisense strand
caaguucuauaucuucuccuu

SEQ ID NO: 8689 - DNA, 21 bp, Homo sapiens
aaagagtgataggacataaag

SEQ ID NO: 8690 - RNA, 21 nt, RNAi-sense strand
agagugauaggacauaaaguu

SEQ ID NO: 8691 - RNA, 21 nt, RNAi-antisense strand
cuuuauguccuaucacucuuu

SEQ ID NO: 8692 - DNA, 21 bp, Homo sapiens
aagagtgataggacataaagg

SEQ ID NO: 8693 - RNA, 21 nt, RNAi-sense strand
gagugauaggacauaaagguu

SEQ ID NO: 8694 - RNA, 21 nt, RNAi-antisense strand
ccuuuauguccuaucacucuu

SEQ ID NO: 8695 - DNA, 21 bp, Homo sapiens
aaagatggtgttcctggcttc

SEQ ID NO: 8696 - RNA, 21 nt, RNAi-sense strand
agaugguguuccuggcuucuu

SEQ ID NO: 8697 - RNA, 21 nt, RNAi-antisense strand
gaagccaggaacaccaucuuu

SEQ ID NO: 8698 - DNA, 21 bp, Homo sapiens
aagatggtgttcctggcttcc

SEQ ID NO: 8699 - RNA, 21 nt, RNAi-sense strand
gaugguguuccuggcuuccuu

SEQ ID NO: 8700 - RNA, 21 nt, RNAi-antisense strand
ggaagccaggaacaccaucuu

SEQ ID NO: 8701 - DNA, 21 bp, Homo sapiens
aatattatgacacataccagg

SEQ ID NO: 8702 - RNA, 21 nt, RNAi-sense strand
uauuaugacacauaccagguu

SEQ ID NO: 8703 - RNA, 21 nt, RNAi-antisense strand
ccugguaugugucauaauauu

SEQ ID NO: 8704 - DNA, 21 bp, Homo sapiens
aagtcctggatcatcaaggcc

SEQ ID NO: 8705 - RNA, 21 nt, RNAi-sense strand
guccuggaucaucaaggccuu

SEQ ID NO: 8706 - RNA, 21 nt, RNAi-antisense strand
ggccuugaugauccaggacuu

SEQ ID NO: 8707 - DNA, 21 bp, Homo sapiens
aaaggagaaccaggcctcctg

SEQ ID NO: 8708 - RNA, 21 nt, RNAi-sense strand
aggagaaccaggccuccuguu

SEQ ID NO: 8709 - RNA, 21 nt, RNAi-antisense strand
caggaggccugguucuccuuu

SEQ ID NO: 8710 - DNA, 21 bp, Homo sapiens
aaggagaaccaggcctcctgt

SEQ ID NO: 8711 - RNA, 21 nt, RNAi-sense strand
ggagaaccaggccuccuguuu

SEQ ID NO: 8712 - RNA, 21 nt, RNAi-antisense strand
acaggaggccugguucuccuu

SEQ ID NO: 8713 - DNA, 21 bp, Homo sapiens
aaccaggcctcctgtgtacac

SEQ ID NO: 8714 - RNA, 21 nt, RNAi-sense strand
ccaggccuccuguguacacuu

SEQ ID NO: 8715 - RNA, 21 nt, RNAi-antisense strand
guguacacaggaggccugguu

SEQ ID NO: 8716 - DNA, 21 bp, Homo sapiens
aagacaaggcgcagctggctt

SEQ ID NO: 8717 - RNA, 21 nt, RNAi-sense strand
gacaaggcgcagcuggcuuuu

SEQ ID NO: 8718 - RNA, 21 nt, RNAi-antisense strand
aagccagcugcgccuugucuu

SEQ ID NO: 8719 - DNA, 21 bp, Homo sapiens
aaggcgcagctggcttgaaag

SEQ ID NO: 8720 - RNA, 21 nt, RNAi-sense strand
ggcgcagcuggcuugaaaguu

SEQ ID NO: 8721 - RNA, 21 nt, RNAi-antisense strand
cuuucaagccagcugcgccuu

SEQ ID NO: 8722 - DNA, 21 bp, Homo sapiens
aaatacaggtcttccaggatt

SEQ ID NO: 8723 - RNA, 21 nt, RNAi-sense strand
auacaggucuuccaggauuuu

SEQ ID NO: 8724 - RNA, 21 nt, RNAi-antisense strand
aauccuggaagaccuguauuu

SEQ ID NO: 8725 - DNA, 21 bp, Homo sapiens
aatacaggtcttccaggattt

SEQ ID NO: 8726 - RNA, 21 nt, RNAi-sense strand
uacaggucuuccaggauuuuu

SEQ ID NO: 8727 - RNA, 21 nt, RNAi-antisense strand
aaauccuggaagaccuguauu

SEQ ID NO: 8728 - DNA, 21 bp, Homo sapiens
aaaggtgaaacacttcagcct

SEQ ID NO: 8729 - RNA, 21 nt, RNAi-sense strand
aggugaaacacuucagccuuu

SEQ ID NO: 8730 - RNA, 21 nt, RNAi-antisense strand
aggcugaaguguuucaccuuu

SEQ ID NO: 8731 - DNA, 21 bp, Homo sapiens
aaggtgaaacacttcagcctg

SEQ ID NO: 8732 - RNA, 21 nt, RNAi-sense strand
ggugaaacacuucagccuguu

SEQ ID NO: 8733 - RNA, 21 nt, RNAi-antisense strand
caggcugaaguguuucaccuu

SEQ ID NO: 8734 - DNA, 21 bp, Homo sapiens
aaaggattaccaggacctaaa

SEQ ID NO: 8735 - RNA, 21 nt, RNAi-sense strand
aggauuaccaggaccuaaauu

SEQ ID NO: 8736 - RNA, 21 nt, RNAi-antisense strand
uuuagguccugguaauccuuu

SEQ ID NO: 8737 - DNA, 21 bp, Homo sapiens
aaggattaccaggacctaaag

SEQ ID NO: 8738 - RNA, 21 nt, RNAi-sense strand
ggauuaccaggaccuaaaguu

SEQ ID NO: 8739 - RNA, 21 nt, RNAi-antisense strand
cuuuagguccugguaauccuu

SEQ ID NO: 8740 - DNA, 21 bp, Homo sapiens
aaaggcgaactggctctgagt

SEQ ID NO: 8741 - RNA, 21 nt, RNAi-sense strand
aggcgaacuggcucugaguuu

SEQ ID NO: 8742 - RNA, 21 nt, RNAi-antisense strand
acucagagccaguucgccuuu

SEQ ID NO: 8743 - DNA, 21 bp, Homo sapiens
aaggcgaactggctctgagtg

SEQ ID NO: 8744 - RNA, 21 nt, RNAi-sense strand
ggcgaacuggcucugaguguu

SEQ ID NO: 8745 - RNA, 21 nt, RNAi-antisense strand
cacucagagccaguucgccuu

SEQ ID NO: 8746 - DNA, 21 bp, Homo sapiens
aactggctctgagtggtgaga

SEQ ID NO: 8747 - RNA, 21 nt, RNAi-sense strand
cuggcucugaguggugagauu

SEQ ID NO: 8748 - RNA, 21 nt, RNAi-antisense strand
ucucaccacucagagccaguu

SEQ ID NO: 8749 - DNA, 21 bp, Homo sapiens
aaggagaacctggtctccagg

SEQ ID NO: 8750 - RNA, 21 nt, RNAi-sense strand
ggagaaccuggucuccagguu

SEQ ID NO: 8751 - RNA, 21 nt, RNAi-antisense strand
ccuggagaccagguucuccuu

SEQ ID NO: 8752 - DNA, 21 bp, Homo sapiens
aaatgtggagatcctggtctt

SEQ ID NO: 8753 - RNA, 21 nt, RNAi-sense strand
auguggagauccuggucuuuu

SEQ ID NO: 8754 - RNA, 21 nt, RNAi-antisense strand
aagaccaggaucuccacauuu

SEQ ID NO: 8755 - DNA, 21 bp, Homo sapiens
aatgtggagatcctggtcttc

SEQ ID NO: 8756 - RNA, 21 nt, RNAi-sense strand
uguggagauccuggucuucuu

SEQ ID NO: 8757 - RNA, 21 nt, RNAi-antisense strand
gaagaccaggaucuccacauu

SEQ ID NO: 8758 - DNA, 21 bp, Homo sapiens
aaccaggaattccaggaattg

SEQ ID NO: 8759 - RNA, 21 nt, RNAi-sense strand
ccaggaauuccaggaauuguu

SEQ ID NO: 8760 - RNA, 21 nt, RNAi-antisense strand
caauuccuggaauuccugguu

SEQ ID NO: 8761 - DNA, 21 bp, Homo sapiens
aattccaggaattggatttcc

SEQ ID NO: 8762 - RNA, 21 nt, RNAi-sense strand
uuccaggaauuggauuuccuu

SEQ ID NO: 8763 - RNA, 21 nt, RNAi-antisense strand
ggaaauccaauuccuggaauu

SEQ ID NO: 8764 - DNA, 21 bp, Homo sapiens
aaccagcagtagccatgcctg

SEQ ID NO: 8765 - RNA, 21 nt, RNAi-sense strand
ccagcaguagccaugccuguu

SEQ ID NO: 8766 - RNA, 21 nt, RNAi-antisense strand
caggcauggcuacugcugguu

SEQ ID NO: 8767 - DNA, 21 bp, Homo sapiens
aacatggagaaattggactcc

SEQ ID NO: 8768 - RNA, 21 nt, RNAi-sense strand
cauggagaaauuggacuccuu

SEQ ID NO: 8769 - RNA, 21 nt, RNAi-antisense strand
ggaguccaauuucuccauguu

SEQ ID NO: 8770 - DNA, 21 bp, Homo sapiens
aaggacttccaggcttaaatg

SEQ ID NO: 8771 - RNA, 21 nt, RNAi-sense strand
ggacuuccaggcuuaaauguu

SEQ ID NO: 8772 - RNA, 21 nt, RNAi-antisense strand
cauuuaagccuggaaguccuu

SEQ ID NO: 8773 - DNA, 21 bp, Homo sapiens
aattccaggcttggatagatc

SEQ ID NO: 8774 - RNA, 21 nt, RNAi-sense strand
uuccaggcuuggauagaucuu

SEQ ID NO: 8775 - RNA, 21 nt, RNAi-antisense strand
gaucuauccaagccuggaauu

SEQ ID NO: 8776 - DNA, 21 bp, Homo sapiens
aaactggatcaccaggaattc

SEQ ID NO: 8777 - RNA, 21 nt, RNAi-sense strand
acuggaucaccaggaauucuu

SEQ ID NO: 8778 - RNA, 21 nt, RNAi-antisense strand
gaauuccuggugauccaguuu

SEQ ID NO: 8779 - DNA, 21 bp, Homo sapiens
aactggatcaccaggaattcc

SEQ ID NO: 8780 - RNA, 21 nt, RNAi-sense strand
cuggaucaccaggaauuccuu

SEQ ID NO: 8781 - RNA, 21 nt, RNAi-antisense strand
ggaauuccuggugauccaguu

SEQ ID NO: 8782 - DNA, 21 bp, Homo sapiens
aattccaggtcatcaaggtga

SEQ ID NO: 8783 - RNA, 21 nt, RNAi-sense strand
uuccaggucaucaaggugauu

SEQ ID NO: 8784 - RNA, 21 nt, RNAi-antisense strand
ucaccuugaugaccuggaauu

SEQ ID NO: 8785 - DNA, 21 bp, Homo sapiens
aaagaggatatccaggaaatc

SEQ ID NO: 8786 - RNA, 21 nt, RNAi-sense strand
agaggauauccaggaaaucuu

SEQ ID NO: 8787 - RNA, 21 nt, RNAi-antisense strand
gauuuccuggauauccucuuu

SEQ ID NO: 8788 - DNA, 21 bp, Homo sapiens
aagaggatatccaggaaatcc

SEQ ID NO: 8789 - RNA, 21 nt, RNAi-sense strand
gaggauauccaggaaauccuu

SEQ ID NO: 8790 - RNA, 21 nt, RNAi-antisense strand
ggauuuccuggauauccucuu

SEQ ID NO: 8791 - DNA, 21 bp, Homo sapiens
aacaaggagataaaggaaatc

SEQ ID NO: 8792 - RNA, 21 nt, RNAi-sense strand
caaggagauaaaggaaaucuu

SEQ ID NO: 8793 - RNA, 21 nt, RNAi-antisense strand
gauuuccuuuaucuccuuguu

SEQ ID NO: 8794 - DNA, 21 bp, Homo sapiens
aaaggagaaccaggtctcaaa

SEQ ID NO: 8795 - RNA, 21 nt, RNAi-sense strand
aggagaaccaggucucaaauu

SEQ ID NO: 8796 - RNA, 21 nt, RNAi-antisense strand
uuugagaccugguucuccuuu

SEQ ID NO: 8797 - DNA, 21 bp, Homo sapiens
aaggagaaccaggtctcaaag

SEQ ID NO: 8798 - RNA, 21 nt, RNAi-sense strand
ggagaaccaggucucaaaguu

SEQ ID NO: 8799 - RNA, 21 nt, RNAi-antisense strand
cuuugagaccugguucuccuu

SEQ ID NO: 8800 - DNA, 21 bp, Homo sapiens
aaccaggtctcaaaggattcg

SEQ ID NO: 8801 - RNA, 21 nt, RNAi-sense strand
ccaggucucaaaggauucguu

SEQ ID NO: 8802 - RNA, 21 nt, RNAi-antisense strand
cgaauccuuugagaccugguu

SEQ ID NO: 8803 - DNA, 21 bp, Homo sapiens
aaaggattcgcaggaaatcca

SEQ ID NO: 8804 - RNA, 21 nt, RNAi-sense strand
aggauucgcaggaaauccauu

SEQ ID NO: 8805 - RNA, 21 nt, RNAi-antisense strand
uggauuuccugcgaauccuuu

SEQ ID NO: 8806 - DNA, 21 bp, Homo sapiens
aaggattcgcaggaaatccag

SEQ ID NO: 8807 - RNA, 21 nt, RNAi-sense strand
ggauucgcaggaaauccaguu

SEQ ID NO: 8808 - RNA, 21 nt, RNAi-antisense strand
cuggauuuccugcgaauccuu

SEQ ID NO: 8809 - DNA, 21 bp, Homo sapiens
aaatccaggtgagaaaggaaa

SEQ ID NO: 8810 - RNA, 21 nt, RNAi-sense strand
auccaggugagaaaggaaauu

SEQ ID NO: 8811 - RNA, 21 nt, RNAi-antisense strand
uuuccuuucucaccuggauuu

SEQ ID NO: 8812 - DNA, 21 bp, Homo sapiens
aatccaggtgagaaaggaaac

SEQ ID NO: 8813 - RNA, 21 nt, RNAi-sense strand
uccaggugagaaaggaaacuu

SEQ ID NO: 8814 - RNA, 21 nt, RNAi-antisense strand
guuuccuuucucaccuggauu

SEQ ID NO: 8815 - DNA, 21 bp, Homo sapiens
aaaggaaacagaggcgttcca

SEQ ID NO: 8816 - RNA, 21 nt, RNAi-sense strand
aggaaacagaggcguuccauu

SEQ ID NO: 8817 - RNA, 21 nt, RNAi-antisense strand
uggaacgccucuguuuccuuu

SEQ ID NO: 8818 - DNA, 21 bp, Homo sapiens
aaggaaacagaggcgttccag

SEQ ID NO: 8819 - RNA, 21 nt, RNAi-sense strand
ggaaacagaggcguuccaguu

SEQ ID NO: 8820 - RNA, 21 nt, RNAi-antisense strand
cuggaacgccucuguuuccuu

SEQ ID NO: 8821 - DNA, 21 bp, Homo sapiens
aatcctggagaaccaggactc

SEQ ID NO: 8822 - RNA, 21 nt, RNAi-sense strand
uccuggagaaccaggacucuu

SEQ ID NO: 8823 - RNA, 21 nt, RNAi-antisense strand
gaguccugguucuccaggauu

SEQ ID NO: 8824 - DNA, 21 bp, Homo sapiens
aaccaggactccgtggtatac

SEQ ID NO: 8825 - RNA, 21 nt, RNAi-sense strand
ccaggacuccgugguauacuu

SEQ ID NO: 8826 - RNA, 21 nt, RNAi-antisense strand
guauaccacggaguccugguu

SEQ ID NO: 8827 - DNA, 21 bp, Homo sapiens
aaggtacaaggccaggaccac

SEQ ID NO: 8828 - RNA, 21 nt, RNAi-sense strand
gguacaaggccaggaccacuu

SEQ ID NO: 8829 - RNA, 21 nt, RNAi-antisense strand
gugguccuggccuuguaccuu

SEQ ID NO: 8830 - DNA, 21 bp, Homo sapiens
aagtcctggaagtcctggcct

SEQ ID NO: 8831 - RNA, 21 nt, RNAi-sense strand
guccuggaaguccuggccuuu

SEQ ID NO: 8832 - RNA, 21 nt, RNAi-antisense strand
aggccaggacuuccaggacuu

SEQ ID NO: 8833 - DNA, 21 bp, Homo sapiens
aaagccaggtcctcatggtga

SEQ ID NO: 8834 - RNA, 21 nt, RNAi-sense strand
agccagguccucauggugauu

SEQ ID NO: 8835 - RNA, 21 nt, RNAi-antisense strand
ucaccaugaggaccuggcuuu

SEQ ID NO: 8836 - DNA, 21 bp, Homo sapiens
aagccaggtcctcatggtgat

SEQ ID NO: 8837 - RNA, 21 nt, RNAi-sense strand
gccagguccucauggugauuu

SEQ ID NO: 8838 - RNA, 21 nt, RNAi-antisense strand
aucaccaugaggaccuggcuu

SEQ ID NO: 8839 - DNA, 21 bp, Homo sapiens
aaaggaatcaaaggcctcctg

SEQ ID NO: 8840 - RNA, 21 nt, RNAi-sense strand
aggaaucaaaggccuccuguu

SEQ ID NO: 8841 - RNA, 21 nt, RNAi-antisense strand
caggaggccuuugauuccuuu

SEQ ID NO: 8842 - DNA, 21 bp, Homo sapiens
aaggaatcaaaggcctcctgg

SEQ ID NO: 8843 - RNA, 21 nt, RNAi-sense strand
ggaaucaaaggccuccugguu

SEQ ID NO: 8844 - RNA, 21 nt, RNAi-antisense strand
ccaggaggccuuugauuccuu

SEQ ID NO: 8845 - DNA, 21 bp, Homo sapiens
aagaggtgaccaaggacgtga

SEQ ID NO: 8846 - RNA, 21 nt, RNAi-sense strand
gaggugaccaaggacgugauu

SEQ ID NO: 8847 - RNA, 21 nt, RNAi-antisense strand
ucacguccuuggucaccucuu

SEQ ID NO: 8848 - DNA, 21 bp, Homo sapiens
aaggacgtgatggaattcctg

SEQ ID NO: 8849 - RNA, 21 nt, RNAi-sense strand
ggacgugauggaauuccuguu

SEQ ID NO: 8850 - RNA, 21 nt, RNAi-antisense strand
caggaauuccaucacguccuu

SEQ ID NO: 8851 - DNA, 21 bp, Homo sapiens
aattcctggtccagccggaga

SEQ ID NO: 8852 - RNA, 21 nt, RNAi-sense strand
uuccugguccagccggagauu

SEQ ID NO: 8853 - RNA, 21 nt, RNAi-antisense strand
ucuccggcuggaccaggaauu

SEQ ID NO: 8854 - DNA, 21 bp, Homo sapiens
aaatcgtggtccaccaggctc

SEQ ID NO: 8855 - RNA, 21 nt, RNAi-sense strand
aucgugguccaccaggcucuu

SEQ ID NO: 8856 - RNA, 21 nt, RNAi-antisense strand
gagccugguggaccacgauuu

SEQ ID NO: 8857 - DNA, 21 bp, Homo sapiens
aatcgtggtccaccaggctca

SEQ ID NO: 8858 - RNA, 21 nt, RNAi-sense strand
ucgugguccaccaggcucauu

SEQ ID NO: 8859 - RNA, 21 nt, RNAi-antisense strand
ugagccugguggaccacgauu

SEQ ID NO: 8860 - DNA, 21 bp, Homo sapiens
aaaggtccacctggaactgca

SEQ ID NO: 8861 - RNA, 21 nt, RNAi-sense strand
agguccaccuggaacugcauu

SEQ ID NO: 8862 - RNA, 21 nt, RNAi-antisense strand
ugcaguuccagguggaccuuu

SEQ ID NO: 8863 - DNA, 21 bp, Homo sapiens
aaggtccacctggaactgcag

SEQ ID NO: 8864 - RNA, 21 nt, RNAi-sense strand
gguccaccuggaacugcaguu

SEQ ID NO: 8865 - RNA, 21 nt, RNAi-antisense strand
cugcaguuccagguggaccuu

SEQ ID NO: 8866 - DNA, 21 bp, Homo sapiens
aatcctggatttctaggatcc

SEQ ID NO: 8867 - RNA, 21 nt, RNAi-sense strand
uccuggauuucuaggauccuu

SEQ ID NO: 8868 - RNA, 21 nt, RNAi-antisense strand
ggauccuagaaauccaggauu

SEQ ID NO: 8869 - DNA, 21 bp, Homo sapiens
aaaggaccacctggtgtacgt

SEQ ID NO: 8870 - RNA, 21 nt, RNAi-sense strand
aggaccaccugguguacguuu

SEQ ID NO: 8871 - RNA, 21 nt, RNAi-antisense strand
acguacaccaggugguccuuu

SEQ ID NO: 8872 - DNA, 21 bp, Homo sapiens
aaggaccacctggtgtacgtg

SEQ ID NO: 8873 - RNA, 21 nt, RNAi-sense strand
ggaccaccugguguacguguu

SEQ ID NO: 8874 - RNA, 21 nt, RNAi-antisense strand
cacguacaccaggugguccuu

SEQ ID NO: 8875 - DNA, 21 bp, Homo sapiens
aagaggtaagccaggcaagga

SEQ ID NO: 8876 - RNA, 21 nt, RNAi-sense strand
gagguaagccaggcaaggauu

SEQ ID NO: 8877 - RNA, 21 nt, RNAi-antisense strand
uccuugccuggcuuaccucuu

SEQ ID NO: 8878 - DNA, 21 bp, Homo sapiens
aaaccaggaactcctggacca

SEQ ID NO: 8879 - RNA, 21 nt, RNAi-sense strand
accaggaacuccuggaccauu

SEQ ID NO: 8880 - RNA, 21 nt, RNAi-antisense strand
ugguccaggaguuccugguuu

SEQ ID NO: 8881 - DNA, 21 bp, Homo sapiens
aaccaggaactcctggaccag

SEQ ID NO: 8882 - RNA, 21 nt, RNAi-sense strand
ccaggaacuccuggaccaguu

SEQ ID NO: 8883 - RNA, 21 nt, RNAi-antisense strand
cugguccaggaguuccugguu

SEQ ID NO: 8884 - DNA, 21 bp, Homo sapiens
aactcctggaccagctggaga

SEQ ID NO: 8885 - RNA, 21 nt, RNAi-sense strand
cuccuggaccagcuggagauu

SEQ ID NO: 8886 - RNA, 21 nt, RNAi-antisense strand
ucuccagcugguccaggaguu

SEQ ID NO: 8887 - DNA, 21 bp, Homo sapiens
aaaggcaacaaaggttctaaa

SEQ ID NO: 8888 - RNA, 21 nt, RNAi-sense strand
aggcaacaaagguucuaaauu

SEQ ID NO: 8889 - RNA, 21 nt, RNAi-antisense strand
uuuagaaccuuuguugccuuu

SEQ ID NO: 8890 - DNA, 21 bp, Homo sapiens
aaggcaacaaaggttctaaag

SEQ ID NO: 8891 - RNA, 21 nt, RNAi-sense strand
ggcaacaaagguucuaaaguu

SEQ ID NO: 8892 - RNA, 21 nt, RNAi-antisense strand
cuuuagaaccuuuguugccuu

SEQ ID NO: 8893 - DNA, 21 bp, Homo sapiens
aacaaaggttctaaaggagag

SEQ ID NO: 8894 - RNA, 21 nt, RNAi-sense strand
caaagguucuaaaggagaguu

SEQ ID NO: 8895 - RNA, 21 nt, RNAi-antisense strand
cucuccuuuagaaccuuuguu

SEQ ID NO: 8896 - DNA, 21 bp, Homo sapiens
aaaggttctaaaggagagcca

SEQ ID NO: 8897 - RNA, 21 nt, RNAi-sense strand
agguucuaaaggagagccauu

SEQ ID NO: 8898 - RNA, 21 nt, RNAi-antisense strand
uggcucuccuuuagaaccuuu

SEQ ID NO: 8899 - DNA, 21 bp, Homo sapiens
aaggttctaaaggagagccag

SEQ ID NO: 8900 - RNA, 21 nt, RNAi-sense strand
gguucuaaaggagagccaguu

SEQ ID NO: 8901 - RNA, 21 nt, RNAi-antisense strand
cuggcucuccuuuagaaccuu

SEQ ID NO: 8902 - DNA, 21 bp, Homo sapiens
aaaggagagccaggaccagct

SEQ ID NO: 8903 - RNA, 21 nt, RNAi-sense strand
aggagagccaggaccagcuuu

SEQ ID NO: 8904 - RNA, 21 nt, RNAi-antisense strand
agcugguccuggcucuccuuu

SEQ ID NO: 8905 - DNA, 21 bp, Homo sapiens
aaggagagccaggaccagctg

SEQ ID NO: 8906 - RNA, 21 nt, RNAi-sense strand
ggagagccaggaccagcuguu

SEQ ID NO: 8907 - RNA, 21 nt, RNAi-antisense strand
cagcugguccuggcucuccuu

SEQ ID NO: 8908 - DNA, 21 bp, Homo sapiens
aaacgtggagacagtggatca

SEQ ID NO: 8909 - RNA, 21 nt, RNAi-sense strand
acguggagacaguggaucauu

SEQ ID NO: 8910 - RNA, 21 nt, RNAi-antisense strand
ugauccacugucuccacguuu

SEQ ID NO: 8911 - DNA, 21 bp, Homo sapiens
aacgtggagacagtggatcac

SEQ ID NO: 8912 - RNA, 21 nt, RNAi-sense strand
cguggagacaguggaucacuu

SEQ ID NO: 8913 - RNA, 21 nt, RNAi-antisense strand
gugauccacugucuccacguu

SEQ ID NO: 8914 - DNA, 21 bp, Homo sapiens
aacctggacaacgagaggctt

SEQ ID NO: 8915 - RNA, 21 nt, RNAi-sense strand
ccuggacaacgagaggcuuuu

SEQ ID NO: 8916 - RNA, 21 nt, RNAi-antisense strand
aagccucucguuguccagguu

SEQ ID NO: 8917 - DNA, 21 bp, Homo sapiens
aacgagaggctttgtcttcac

SEQ ID NO: 8918 - RNA, 21 nt, RNAi-sense strand
cgagaggcuuugucuucacuu

SEQ ID NO: 8919 - RNA, 21 nt, RNAi-antisense strand
gugaagacaaagccucucguu

SEQ ID NO: 8920 - DNA, 21 bp, Homo sapiens
aaaccacagcaattccttcat

SEQ ID NO: 8921 - RNA, 21 nt, RNAi-sense strand
accacagcaauuccuucauuu

SEQ ID NO: 8922 - RNA, 21 nt, RNAi-antisense strand
augaaggaauugcugugguuu

SEQ ID NO: 8923 - DNA, 21 bp, Homo sapiens
aaccacagcaattccttcatg

SEQ ID NO: 8924 - RNA, 21 nt, RNAi-sense strand
ccacagcaauuccuucauguu

SEQ ID NO: 8925 - RNA, 21 nt, RNAi-antisense strand
caugaaggaauugcugugguu

SEQ ID NO: 8926 - DNA, 21 bp, Homo sapiens
aagaccttggaactcttggca

SEQ ID NO: 8927 - RNA, 21 nt, RNAi-sense strand
gaccuuggaacucuuggcauu

SEQ ID NO: 8928 - RNA, 21 nt, RNAi-antisense strand
ugccaagaguuccaaggucuu

SEQ ID NO: 8929 - DNA, 21 bp, Homo sapiens
aactcttggcagctgcctgca

SEQ ID NO: 8930 - RNA, 21 nt, RNAi-sense strand
cucuuggcagcugccugcauu

SEQ ID NO: 8931 - RNA, 21 nt, RNAi-antisense strand
ugcaggcagcugccaagaguu

SEQ ID NO: 8932 - DNA, 21 bp, Homo sapiens
aatgccattcttattctgcaa

SEQ ID NO: 8933 - RNA, 21 nt, RNAi-sense strand
ugccauucuuauucugcaauu

SEQ ID NO: 8934 - RNA, 21 nt, RNAi-antisense strand
uugcagaauaagaauggcauu

SEQ ID NO: 8935 - DNA, 21 bp, Homo sapiens
aatgattattcatactggctg

SEQ ID NO: 8936 - RNA, 21 nt, RNAi-sense strand
ugauuauucauacuggcuguu

SEQ ID NO: 8937 - RNA, 21 nt, RNAi-antisense strand
cagccaguaugaauaaucauu

SEQ ID NO: 8938 - DNA, 21 bp, Homo sapiens
aacaccagctctgatgccaat

SEQ ID NO: 8939 - RNA, 21 nt, RNAi-sense strand
caccagcucugaugccaauuu

SEQ ID NO: 8940 - RNA, 21 nt, RNAi-antisense strand
auuggcaucagagcugguguu

SEQ ID NO: 8941 - DNA, 21 bp, Homo sapiens
aagcagatgcactgtttgtga

SEQ ID NO: 8942 - RNA, 21 nt, RNAi-sense strand
gcagaugcacuguuugugauu

SEQ ID NO: 8943 - RNA, 21 nt, RNAi-antisense strand
ucacaaacagugcaucugcuu

SEQ ID NO: 8944 - DNA, 21 bp, Homo sapiens
aaggtcctgcgatcgccatag

SEQ ID NO: 8945 - RNA, 21 nt, RNAi-sense strand
gguccugcgaucgccauaguu

SEQ ID NO: 8946 - RNA, 21 nt, RNAi-antisense strand
cuauggcgaucgcaggaccuu

SEQ ID NO: 8947 - DNA, 21 bp, Homo sapiens
aaaccactgacattcctccat

SEQ ID NO: 8948 - RNA, 21 nt, RNAi-sense strand
accacugacauuccuccauuu

SEQ ID NO: 8949 - RNA, 21 nt, RNAi-antisense strand
auggaggaaugucagugguuu

SEQ ID NO: 8950 - DNA, 21 bp, Homo sapiens
aaccactgacattcctccatg

SEQ ID NO: 8951 - RNA, 21 nt, RNAi-sense strand
ccacugacauuccuccauguu

SEQ ID NO: 8952 - RNA, 21 nt, RNAi-antisense strand
cauggaggaaugucagugguu

SEQ ID NO: 8953 - DNA, 21 bp, Homo sapiens
aaagcctattccatcaactgt

SEQ ID NO: 8954 - RNA, 21 nt, RNAi-sense strand
agccuauuccaucaacuguuu

SEQ ID NO: 8955 - RNA, 21 nt, RNAi-antisense strand
acaguugauggaauaggcuuu

SEQ ID NO: 8956 - DNA, 21 bp, Homo sapiens
aagcctattccatcaactgtg

SEQ ID NO: 8957 - RNA, 21 nt, RNAi-sense strand
gccuauuccaucaacuguguu

SEQ ID NO: 8958 - RNA, 21 nt, RNAi-antisense strand
cacaguugauggaauaggcuu

SEQ ID NO: 8959 - DNA, 21 bp, Homo sapiens
aaataataagtcgctgtcagg

SEQ ID NO: 8960 - RNA, 21 nt, RNAi-sense strand
auaauaagucgcugucagguu

SEQ ID NO: 8961 - RNA, 21 nt, RNAi-antisense strand
ccugacagcgacuuauuauuu

SEQ ID NO: 8962 - DNA, 21 bp, Homo sapiens
aataataagtcgctgtcaggt

SEQ ID NO: 8963 - RNA, 21 nt, RNAi-sense strand
uaauaagucgcugucagguuu

SEQ ID NO: 8964 - RNA, 21 nt, RNAi-antisense strand
accugacagcgacuuauuauu

SEQ ID NO: 8965 - DNA, 21 bp, Homo sapiens
aataagtcgctgtcaggtgtg

SEQ ID NO: 8966 - RNA, 21 nt, RNAi-sense strand
uaagucgcugucagguguguu

SEQ ID NO: 8967 - RNA, 21 nt, RNAi-antisense strand
cacaccugacagcgacuuauu

SEQ ID NO: 8968 - DNA, 21 bp, Homo sapiens
aagtcgctgtcaggtgtgcat

SEQ ID NO: 8969 - RNA, 21 nt, RNAi-sense strand
gucgcugucaggugugcauuu

SEQ ID NO: 8970 - RNA, 21 nt, RNAi-antisense strand
augcacaccugacagcgacuu

SEQ ID NO: 8971 - DNA, 21 bp, Homo sapiens
aaagacatgcagaactgctat

SEQ ID NO: 8972 - RNA, 21 nt, RNAi-sense strand
agacaugcagaacugcuauuu

SEQ ID NO: 8973 - RNA, 21 nt, RNAi-antisense strand
auagcaguucugcaugucuuu

SEQ ID NO: 8974 - DNA, 21 bp, Homo sapiens
aagacatgcagaactgctatt

SEQ ID NO: 8975 - RNA, 21 nt, RNAi-sense strand
gacaugcagaacugcuauuuu

SEQ ID NO: 8976 - RNA, 21 nt, RNAi-antisense strand
aauagcaguucugcaugucuu

SEQ ID NO: 8977 - DNA, 21 bp, Homo sapiens
aaagtaatgacagaacatgct

SEQ ID NO: 8978 - RNA, 21 nt, RNAi-sense strand
aguaaugacagaacaugcuuu

SEQ ID NO: 8979 - RNA, 21 nt, RNAi-antisense strand
agcauguucugucauuacuuu

SEQ ID NO: 8980 - DNA, 21 bp, Homo sapiens
aagtaatgacagaacatgctg

SEQ ID NO: 8981 - RNA, 21 nt, RNAi-sense strand
guaaugacagaacaugcuguu

SEQ ID NO: 8982 - RNA, 21 nt, RNAi-antisense strand
cagcauguucugucauuacuu

SEQ ID NO: 8983 - DNA, 21 bp, Homo sapiens
aatgacagaacatgctgttat

SEQ ID NO: 8984 - RNA, 21 nt, RNAi-sense strand
ugacagaacaugcuguuauuu

SEQ ID NO: 8985 - RNA, 21 nt, RNAi-antisense strand
auaacagcauguucugucauu

SEQ ID NO: 8986 - DNA, 21 bp, Homo sapiens
aaccaaacaatattgctccat

SEQ ID NO: 8987 - RNA, 21 nt, RNAi-sense strand
ccaaacaauauugcuccauuu

SEQ ID NO: 8988 - RNA, 21 nt, RNAi-antisense strand
auggagcaauauuguuugguu

SEQ ID NO: 8989 - DNA, 21 bp, Homo sapiens
aaacaatattgctccatgatg

SEQ ID NO: 8990 - RNA, 21 nt, RNAi-sense strand
acaauauugcuccaugauguu

SEQ ID NO: 8991 - RNA, 21 nt, RNAi-antisense strand
caucauggagcaauauuguuu

SEQ ID NO: 8992 - DNA, 21 bp, Homo sapiens
aacaatattgctccatgatga

SEQ ID NO: 8993 - RNA, 21 nt, RNAi-sense strand
caauauugcuccaugaugauu

SEQ ID NO: 8994 - RNA, 21 nt, RNAi-antisense strand
ucaucauggagcaauauuguu

SEQ ID NO: 8995 - DNA, 21 bp, Homo sapiens
aatattgctccatgatgactt

SEQ ID NO: 8996 - RNA, 21 nt, RNAi-sense strand
uauugcuccaugaugacuuuu

SEQ ID NO: 8997 - RNA, 21 nt, RNAi-antisense strand
aagucaucauggagcaauauu

SEQ ID NO: 8998 - DNA, 21 bp, Homo sapiens
aaagcaattctttcaagtgca

SEQ ID NO: 8999 - RNA, 21 nt, RNAi-sense strand
agcaauucuuucaagugcauu

SEQ ID NO: 9000 - RNA, 21 nt, RNAi-antisense strand
ugcacuugaaagaauugcuuu

SEQ ID NO: 9001 - DNA, 21 bp, Homo sapiens
aagcaattctttcaagtgcag

SEQ ID NO: 9002 - RNA, 21 nt, RNAi-sense strand
gcaauucuuucaagugcaguu

SEQ ID NO: 9003 - RNA, 21 nt, RNAi-antisense strand
cugcacuugaaagaauugcuu

SEQ ID NO: 9004 - DNA, 21 bp, Homo sapiens
aattctttcaagtgcagttct

SEQ ID NO: 9005 - RNA, 21 nt, RNAi-sense strand
uucuuucaagugcaguucuuu

SEQ ID NO: 9006 - RNA, 21 nt, RNAi-antisense strand
agaacugcacuugaaagaauu

SEQ ID NO: 9007 - DNA, 21 bp, Homo sapiens
aagtgcagttctgtgatctgg

SEQ ID NO: 9008 - RNA, 21 nt, RNAi-sense strand
gugcaguucugugaucugguu

SEQ ID NO: 9009 - RNA, 21 nt, RNAi-antisense strand
ccagaucacagaacugcacuu

SEQ ID NO: 9010 - DNA, 21 bp, Homo sapiens
aatctgtgctgtttcaaagtt

SEQ ID NO: 9011 - RNA, 21 nt, RNAi-sense strand
ucugugcuguuucaaaguuuu

SEQ ID NO: 9012 - RNA, 21 nt, RNAi-antisense strand
aacuuugaaacagcacagauu

SEQ ID NO: 9013 - DNA, 21 bp, Homo sapiens
aaagttctctgtggcaaagca

SEQ ID NO: 9014 - RNA, 21 nt, RNAi-sense strand
aguucucuguggcaaagcauu

SEQ ID NO: 9015 - RNA, 21 nt, RNAi-antisense strand
ugcuuugccacagagaacuuu

SEQ ID NO: 9016 - DNA, 21 bp, Homo sapiens
aagttctctgtggcaaagcag

SEQ ID NO: 9017 - RNA, 21 nt, RNAi-sense strand
guucucuguggcaaagcaguu

SEQ ID NO: 9018 - RNA, 21 nt, RNAi-antisense strand
cugcuuugccacagagaacuu

SEQ ID NO: 9019 - DNA, 21 bp, Homo sapiens
aaagcagcaactattcacaaa

SEQ ID NO: 9020 - RNA, 21 nt, RNAi-sense strand
agcagcaacuauucacaaauu

SEQ ID NO: 9021 - RNA, 21 nt, RNAi-antisense strand
uuugugaauaguugcugcuuu

SEQ ID NO: 9022 - DNA, 21 bp, Homo sapiens
aaacctattccacttacatcc

SEQ ID NO: 9023 - RNA, 21 nt, RNAi-sense strand
accuauuccacuuacauccuu

SEQ ID NO: 9024 - RNA, 21 nt, RNAi-antisense strand
ggauguaaguggaauagguuu

SEQ ID NO: 9025 - DNA, 21 bp, Homo sapiens
aacctattccacttacatcca

SEQ ID NO: 9026 - RNA, 21 nt, RNAi-sense strand
ccuauuccacuuacauccauu

SEQ ID NO: 9027 - RNA, 21 nt, RNAi-antisense strand
uggauguaaguggaauagguu

SEQ ID NO: 9028 - DNA, 21 bp, Homo sapiens
aaggcactgtcactacggtga

SEQ ID NO: 9029 - RNA, 21 nt, RNAi-sense strand
ggcacugucacuacggugauu

SEQ ID NO: 9030 - RNA, 21 nt, RNAi-antisense strand
ucaccguagugacagugccuu

SEQ ID NO: 9031 - DNA, 21 bp, Homo sapiens
aagtttgaatgctgcacgtta

SEQ ID NO: 9032 - RNA, 21 nt, RNAi-sense strand
guuugaaugcugcacguuauu

SEQ ID NO: 9033 - RNA, 21 nt, RNAi-antisense strand
uaacgugcagcauucaaacuu

SEQ ID NO: 9034 - DNA, 21 bp, Homo sapiens
aatgctgcacgttatgaaata

SEQ ID NO: 9035 - RNA, 21 nt, RNAi-sense strand
ugcugcacguuaugaaauauu

SEQ ID NO: 9036 - RNA, 21 nt, RNAi-antisense strand
uauuucauaacgugcagcauu

SEQ ID NO: 9037 - DNA, 21 bp, Homo sapiens
aaggcctgatggaacacagaa

SEQ ID NO: 9038 - RNA, 21 nt, RNAi-sense strand
ggccugauggaacacagaauu

SEQ ID NO: 9039 - RNA, 21 nt, RNAi-antisense strand
uucuguguuccaucaggccuu

SEQ ID NO: 9040 - DNA, 21 bp, Homo sapiens
aacacagaactgaactgaggt

SEQ ID NO: 9041 - RNA, 21 nt, RNAi-sense strand
cacagaacugaacugagguuu

SEQ ID NO: 9042 - RNA, 21 nt, RNAi-antisense strand
accucaguucaguucuguguu

SEQ ID NO: 9043 - DNA, 21 bp, Homo sapiens
aactgaactgaggttcatgga

SEQ ID NO: 9044 - RNA, 21 nt, RNAi-sense strand
cugaacugagguucauggauu

SEQ ID NO: 9045 - RNA, 21 nt, RNAi-antisense strand
uccaugaaccucaguucaguu

SEQ ID NO: 9046 - DNA, 21 bp, Homo sapiens
aattcattcactgtagctcta

SEQ ID NO: 9047 - RNA, 21 nt, RNAi-sense strand
uucauucacuguagcucuauu

SEQ ID NO: 9048 - RNA, 21 nt, RNAi-antisense strand
uagagcuacagugaaugaauu

SEQ ID NO: 9049 - DNA, 21 bp, Homo sapiens
aaatctgcttgtatccaagca

SEQ ID NO: 9050 - RNA, 21 nt, RNAi-sense strand
aucugcuuguauccaagcauu

SEQ ID NO: 9051 - RNA, 21 nt, RNAi-antisense strand
ugcuuggauacaagcagauuu

SEQ ID NO: 9052 - DNA, 21 bp, Homo sapiens
aatctgcttgtatccaagcat

SEQ ID NO: 9053 - RNA, 21 nt, RNAi-sense strand
ucugcuuguauccaagcauuu

SEQ ID NO: 9054 - RNA, 21 nt, RNAi-antisense strand
augcuuggauacaagcagauu

SEQ ID NO: 9055 - DNA, 21 bp, Homo sapiens
aaatgtgcactttatcctcat

SEQ ID NO: 9056 - RNA, 21 nt, RNAi-sense strand
augugcacuuuauccucauuu

SEQ ID NO: 9057 - RNA, 21 nt, RNAi-antisense strand
augaggauaaagugcacauuu

SEQ ID NO: 9058 - DNA, 21 bp, Homo sapiens
aatgtgcactttatcctcatt

SEQ ID NO: 9059 - RNA, 21 nt, RNAi-sense strand
ugugcacuuuauccucauuuu

SEQ ID NO: 9060 - RNA, 21 nt, RNAi-antisense strand
aaugaggauaaagugcacauu

SEQ ID NO: 9061 - DNA, 21 bp, Homo sapiens
aaatgttggtgcataccttat

SEQ ID NO: 9062 - RNA, 21 nt, RNAi-sense strand
auguuggugcauaccuuauuu

SEQ ID NO: 9063 - RNA, 21 nt, RNAi-antisense strand
auaagguaugcaccaacauuu

SEQ ID NO: 9064 - DNA, 21 bp, Homo sapiens
aatgttggtgcataccttatg

SEQ ID NO: 9065 - RNA, 21 nt, RNAi-sense strand
uguuggugcauaccuuauguu

SEQ ID NO: 9066 - RNA, 21 nt, RNAi-antisense strand
cauaagguaugcaccaacauu

SEQ ID NO: 9067 - DNA, 21 bp, Homo sapiens
aatccatgaaagaacttaagg

SEQ ID NO: 9068 - RNA, 21 nt, RNAi-sense strand
uccaugaaagaacuuaagguu

SEQ ID NO: 9069 - RNA, 21 nt, RNAi-antisense strand
ccuuaaguucuuucauggauu

SEQ ID NO: 9070 - DNA, 21 bp, Homo sapiens
aagaacttaaggcatttgttg

SEQ ID NO: 9071 - RNA, 21 nt, RNAi-sense strand
gaacuuaaggcauuuguuguu

SEQ ID NO: 9072 - RNA, 21 nt, RNAi-antisense strand
caacaaaugccuuaaguucuu

SEQ ID NO: 9073 - DNA, 21 bp, Homo sapiens
aacttaaggcatttgttggtt

SEQ ID NO: 9074 - RNA, 21 nt, RNAi-sense strand
cuuaaggcauuuguugguuuu

SEQ ID NO: 9075 - RNA, 21 nt, RNAi-antisense strand
aaccaacaaaugccuuaaguu

SEQ ID NO: 9076 - DNA, 21 bp, Homo sapiens
aaggcatttgttggtttatca

SEQ ID NO: 9077 - RNA, 21 nt, RNAi-sense strand
ggcauuuguugguuuaucauu

SEQ ID NO: 9078 - RNA, 21 nt, RNAi-antisense strand
ugauaaaccaacaaaugccuu

SEQ ID NO: 9079 - DNA, 21 bp, Homo sapiens
aatatgtcatcactctaggtt

SEQ ID NO: 9080 - RNA, 21 nt, RNAi-sense strand
uaugucaucacucuagguuuu

SEQ ID NO: 9081 - RNA, 21 nt, RNAi-antisense strand
aaccuagagugaugacauauu

SEQ ID NO: 9082 - DNA, 21 bp, Homo sapiens
aaaccatactgaaagagtcat

SEQ ID NO: 9083 - RNA, 21 nt, RNAi-sense strand
accauacugaaagagucauuu

SEQ ID NO: 9084 - RNA, 21 nt, RNAi-antisense strand
augacucuuucaguaugguuu

SEQ ID NO: 9085 - DNA, 21 bp, Homo sapiens
aaccatactgaaagagtcatt

SEQ ID NO: 9086 - RNA, 21 nt, RNAi-sense strand
ccauacugaaagagucauuuu

SEQ ID NO: 9087 - RNA, 21 nt, RNAi-antisense strand
aaugacucuuucaguaugguu

SEQ ID NO: 9088 - DNA, 21 bp, Homo sapiens
aaactgtataacttggccgct

SEQ ID NO: 9089 - RNA, 21 nt, RNAi-sense strand
acuguauaacuuggccgcuuu

SEQ ID NO: 9090 - RNA, 21 nt, RNAi-antisense strand
agcggccaaguuauacaguuu

SEQ ID NO: 9091 - DNA, 21 bp, Homo sapiens
aactgtataacttggccgctg

SEQ ID NO: 9092 - RNA, 21 nt, RNAi-sense strand
cuguauaacuuggccgcuguu

SEQ ID NO: 9093 - RNA, 21 nt, RNAi-antisense strand
cagcggccaaguuauacaguu

SEQ ID NO: 9094 - DNA, 21 bp, Homo sapiens
aacttggccgctgtatgtctt

SEQ ID NO: 9095 - RNA, 21 nt, RNAi-sense strand
cuuggccgcuguaugucuuuu

SEQ ID NO: 9096 - RNA, 21 nt, RNAi-antisense strand
aagacauacagcggccaaguu

SEQ ID NO: 9097 - DNA, 21 bp, Homo sapiens
aactatcatgttattcagcac

SEQ ID NO: 9098 - RNA, 21 nt, RNAi-sense strand
cuaucauguuauucagcacuu

SEQ ID NO: 9099 - RNA, 21 nt, RNAi-antisense strand
gugcugaauaacaugauaguu

SEQ ID NO: 9100 - DNA, 21 bp, Homo sapiens
aagcatgtccaggcactgtac

SEQ ID NO: 9101 - RNA, 21 nt, RNAi-sense strand
gcauguccaggcacuguacuu

SEQ ID NO: 9102 - RNA, 21 nt, RNAi-antisense strand
guacagugccuggacaugcuu

SEQ ID NO: 9103 - DNA, 21 bp, Homo sapiens
aacctacagagatgctaagag

SEQ ID NO: 9104 - RNA, 21 nt, RNAi-sense strand
ccuacagagaugcuaagaguu

SEQ ID NO: 9105 - RNA, 21 nt, RNAi-antisense strand
cucuuagcaucucuguagguu

SEQ ID NO: 9106 - DNA, 21 bp, Homo sapiens
aaagtaactcattgctctgta

SEQ ID NO: 9107 - RNA, 21 nt, RNAi-sense strand
aguaacucauugcucuguauu

SEQ ID NO: 9108 - RNA, 21 nt, RNAi-antisense strand
uacagagcaaugaguuacuuu

SEQ ID NO: 9109 - DNA, 21 bp, Homo sapiens
aagtaactcattgctctgtaa

SEQ ID NO: 9110 - RNA, 21 nt, RNAi-sense strand
guaacucauugcucuguaauu

SEQ ID NO: 9111 - RNA, 21 nt, RNAi-antisense strand
uuacagagcaaugaguuacuu

SEQ ID NO: 9112 - DNA, 21 bp, Homo sapiens
aatctcacatatacagtagct

SEQ ID NO: 9113 - RNA, 21 nt, RNAi-sense strand
ucucacauauacaguagcuuu

SEQ ID NO: 9114 - RNA, 21 nt, RNAi-antisense strand
agcuacuguauaugugagauu

SEQ ID NO: 9115 - DNA, 21 bp, Homo sapiens
aattcagcaggccagtaaggt

SEQ ID NO: 9116 - RNA, 21 nt, RNAi-sense strand
uucagcaggccaguaagguuu

SEQ ID NO: 9117 - RNA, 21 nt, RNAi-antisense strand
accuuacuggccugcugaauu

SEQ ID NO: 9118 - DNA, 21 bp, Homo sapiens
aaactcaggcttctagtttct

SEQ ID NO: 9119 - RNA, 21 nt, RNAi-sense strand
acucaggcuucuaguuucuuu

SEQ ID NO: 9120 - RNA, 21 nt, RNAi-antisense strand
agaaacuagaagccugaguuu

SEQ ID NO: 9121 - DNA, 21 bp, Homo sapiens
aactcaggcttctagtttctc

SEQ ID NO: 9122 - RNA, 21 nt, RNAi-sense strand
cucaggcuucuaguuucucuu

SEQ ID NO: 9123 - RNA, 21 nt, RNAi-antisense strand
gagaaacuagaagccugaguu

SEQ ID NO: 9124 - DNA, 21 bp, Homo sapiens
aaagctaagagaagataaggt

SEQ ID NO: 9125 - RNA, 21 nt, RNAi-sense strand
agcuaagagaagauaagguuu

SEQ ID NO: 9126 - RNA, 21 nt, RNAi-antisense strand
accuuaucuucucuuagcuuu

SEQ ID NO: 9127 - DNA, 21 bp, Homo sapiens
aagctaagagaagataaggtc

SEQ ID NO: 9128 - RNA, 21 nt, RNAi-sense strand
gcuaagagaagauaaggucuu

SEQ ID NO: 9129 - RNA, 21 nt, RNAi-antisense strand
gaccuuaucuucucuuagcuu

SEQ ID NO: 9130 - DNA, 21 bp, Homo sapiens
aagagaagataaggtctgaat

SEQ ID NO: 9131 - RNA, 21 nt, RNAi-sense strand
gagaagauaaggucugaauuu

SEQ ID NO: 9132 - RNA, 21 nt, RNAi-antisense strand
auucagaccuuaucuucucuu

SEQ ID NO: 9133 - DNA, 21 bp, Homo sapiens
aaggtctgaataatagcagaa

SEQ ID NO: 9134 - RNA, 21 nt, RNAi-sense strand
ggucugaauaauagcagaauu

SEQ ID NO: 9135 - RNA, 21 nt, RNAi-antisense strand
uucugcuauuauucagaccuu

SEQ ID NO: 9136 - DNA, 21 bp, Homo sapiens
aactagtgttataccttgatg

SEQ ID NO: 9137 - RNA, 21 nt, RNAi-sense strand
cuaguguuauaccuugauguu

SEQ ID NO: 9138 - RNA, 21 nt, RNAi-antisense strand
caucaagguauaacacuaguu

SEQ ID NO: 9139 - DNA, 21 bp, Homo sapiens
aacactattgatgagtcttag

SEQ ID NO: 9140 - RNA, 21 nt, RNAi-sense strand
cacuauugaugagucuuaguu

SEQ ID NO: 9141 - RNA, 21 nt, RNAi-antisense strand
cuaagacucaucaauaguguu

SEQ ID NO: 9142 - DNA, 21 bp, Homo sapiens
aaagagacaaagctttgaaga

SEQ ID NO: 9143 - RNA, 21 nt, RNAi-sense strand
agagacaaagcuuugaagauu

SEQ ID NO: 9144 - RNA, 21 nt, RNAi-antisense strand
ucuucaaagcuuugucucuuu

SEQ ID NO: 9145 - DNA, 21 bp, Homo sapiens
aagagacaaagctttgaagat

SEQ ID NO: 9146 - RNA, 21 nt, RNAi-sense strand
gagacaaagcuuugaagauuu

SEQ ID NO: 9147 - RNA, 21 nt, RNAi-antisense strand
aucuucaaagcuuugucucuu

SEQ ID NO: 9148 - DNA, 21 bp, Homo sapiens
aaattcaggctactgcttcaa

SEQ ID NO: 9149 - RNA, 21 nt, RNAi-sense strand
auucaggcuacugcuucaauu

SEQ ID NO: 9150 - RNA, 21 nt, RNAi-antisense strand
uugaagcaguagccugaauuu

SEQ ID NO: 9151 - DNA, 21 bp, Homo sapiens
aattcaggctactgcttcaat

SEQ ID NO: 9152 - RNA, 21 nt, RNAi-sense strand
uucaggcuacugcuucaauuu

SEQ ID NO: 9153 - RNA, 21 nt, RNAi-antisense strand
auugaagcaguagccugaauu

SEQ ID NO: 9154 - DNA, 21 bp, Homo sapiens
aaactaagatgtgcagcattt

SEQ ID NO: 9155 - RNA, 21 nt, RNAi-sense strand
acuaagaugugcagcauuuuu

SEQ ID NO: 9156 - RNA, 21 nt, RNAi-antisense strand
aaaugcugcacaucuuaguuu

SEQ ID NO: 9157 - DNA, 21 bp, Homo sapiens
aactaagatgtgcagcatttc

SEQ ID NO: 9158 - RNA, 21 nt, RNAi-sense strand
cuaagaugugcagcauuucuu

SEQ ID NO: 9159 - RNA, 21 nt, RNAi-antisense strand
gaaaugcugcacaucuuaguu

SEQ ID NO: 9160 - DNA, 21 bp, Homo sapiens
aagatgtgcagcatttcactt

SEQ ID NO: 9161 - RNA, 21 nt, RNAi-sense strand
gaugugcagcauuucacuuuu

SEQ ID NO: 9162 - RNA, 21 nt, RNAi-antisense strand
aagugaaaugcugcacaucuu

SEQ ID NO: 9163 - DNA, 21 bp, Homo sapiens
aaggtactatagcggatatag

SEQ ID NO: 9164 - RNA, 21 nt, RNAi-sense strand
gguacuauagcggauauaguu

SEQ ID NO: 9165 - RNA, 21 nt, RNAi-antisense strand
cuauauccgcuauaguaccuu

SEQ ID NO: 9166 - DNA, 21 bp, Homo sapiens
aaagtgtggtctctggaagag

SEQ ID NO: 9167 - RNA, 21 nt, RNAi-sense strand
aguguggucucuggaagaguu

SEQ ID NO: 9168 - RNA, 21 nt, RNAi-antisense strand
cucuuccagagaccacacuuu

SEQ ID NO: 9169 - DNA, 21 bp, Homo sapiens
aagtgtggtctctggaagagc

SEQ ID NO: 9170 - RNA, 21 nt, RNAi-sense strand
guguggucucuggaagagcuu

SEQ ID NO: 9171 - RNA, 21 nt, RNAi-antisense strand
gcucuuccagagaccacacuu

SEQ ID NO: 9172 - DNA, 21 bp, Homo sapiens
aagagcagtatcagcatcatc

SEQ ID NO: 9173 - RNA, 21 nt, RNAi-sense strand
gagcaguaucagcaucaucuu

SEQ ID NO: 9174 - RNA, 21 nt, RNAi-antisense strand
gaugaugcugauacugcucuu

SEQ ID NO: 9175 - DNA, 21 bp, Homo sapiens
aacttgtcacagatgcagatt

SEQ ID NO: 9176 - RNA, 21 nt, RNAi-sense strand
cuugucacagaugcagauuuu

SEQ ID NO: 9177 - RNA, 21 nt, RNAi-antisense strand
aaucugcaucugugacaaguu

SEQ ID NO: 9178 - DNA, 21 bp, Homo sapiens
aaacctgttctatcaatccaa

SEQ ID NO: 9179 - RNA, 21 nt, RNAi-sense strand
accuguucuaucaauccaauu

SEQ ID NO: 9180 - RNA, 21 nt, RNAi-antisense strand
uuggauugauagaacagguuu

SEQ ID NO: 9181 - DNA, 21 bp, Homo sapiens
aacctgttctatcaatccaag

SEQ ID NO: 9182 - RNA, 21 nt, RNAi-sense strand
ccuguucuaucaauccaaguu

SEQ ID NO: 9183 - RNA, 21 nt, RNAi-antisense strand
cuuggauugauagaacagguu

SEQ ID NO: 9184 - DNA, 21 bp, Homo sapiens
aatccaagcacactccgcagg

SEQ ID NO: 9185 - RNA, 21 nt, RNAi-sense strand
uccaagcacacuccgcagguu

SEQ ID NO: 9186 - RNA, 21 nt, RNAi-antisense strand
ccugcggagugugcuuggauu

SEQ ID NO: 9187 - DNA, 21 bp, Homo sapiens
aagcacactccgcaggcagtt

SEQ ID NO: 9188 - RNA, 21 nt, RNAi-sense strand
gcacacuccgcaggcaguuuu

SEQ ID NO: 9189 - RNA, 21 nt, RNAi-antisense strand
aacugccugcggagugugcuu

SEQ ID NO: 9190 - DNA, 21 bp, Homo sapiens
aactgctccatccgtgcctct

SEQ ID NO: 9191 - RNA, 21 nt, RNAi-sense strand
cugcuccauccgugccucuuu

SEQ ID NO: 9192 - RNA, 21 nt, RNAi-antisense strand
agaggcacggauggagcaguu

SEQ ID NO: 9193 - DNA, 21 bp, Homo sapiens
aaagttcaaactcacaggtga

SEQ ID NO: 9194 - RNA, 21 nt, RNAi-sense strand
aguucaaacucacaggugauu

SEQ ID NO: 9195 - RNA, 21 nt, RNAi-antisense strand
ucaccugugaguuugaacuuu

SEQ ID NO: 9196 - DNA, 21 bp, Homo sapiens
aagttcaaactcacaggtgac

SEQ ID NO: 9197 - RNA, 21 nt, RNAi-sense strand
guucaaacucacaggugacuu

SEQ ID NO: 9198 - RNA, 21 nt, RNAi-antisense strand
gucaccugugaguuugaacuu

SEQ ID NO: 9199 - DNA, 21 bp, Homo sapiens
aaactcacaggtgactctaag

SEQ ID NO: 9200 - RNA, 21 nt, RNAi-sense strand
acucacaggugacucuaaguu

SEQ ID NO: 9201 - RNA, 21 nt, RNAi-antisense strand
cuuagagucaccugugaguuu

SEQ ID NO: 9202 - DNA, 21 bp, Homo sapiens
aactcacaggtgactctaagg

SEQ ID NO: 9203 - RNA, 21 nt, RNAi-sense strand
cucacaggugacucuaagguu

SEQ ID NO: 9204 - RNA, 21 nt, RNAi-antisense strand
ccuuagagucaccugugaguu

SEQ ID NO: 9205 - DNA, 21 bp, Homo sapiens
aatgtcaaaccactggcctcc

SEQ ID NO: 9206 - RNA, 21 nt, RNAi-sense strand
ugucaaaccacuggccuccuu

SEQ ID NO: 9207 - RNA, 21 nt, RNAi-antisense strand
ggaggccagugguuugacauu

SEQ ID NO: 9208 - DNA, 21 bp, Homo sapiens
aaaccactggcctccactcag

SEQ ID NO: 9209 - RNA, 21 nt, RNAi-sense strand
accacuggccuccacucaguu

SEQ ID NO: 9210 - RNA, 21 nt, RNAi-antisense strand
cugaguggaggccagugguuu

SEQ ID NO: 9211 - DNA, 21 bp, Homo sapiens
aaccactggcctccactcagg

SEQ ID NO: 9212 - RNA, 21 nt, RNAi-sense strand
ccacuggccuccacucagguu

SEQ ID NO: 9213 - RNA, 21 nt, RNAi-antisense strand
ccugaguggaggccagugguu

SEQ ID NO: 9214 - DNA, 21 bp, Homo sapiens
aacttctgaggaagacaagtg

SEQ ID NO: 9215 - RNA, 21 nt, RNAi-sense strand
cuucugaggaagacaaguguu

SEQ ID NO: 9216 - RNA, 21 nt, RNAi-antisense strand
cacuugucuuccucagaaguu

SEQ ID NO: 9217 - DNA, 21 bp, Homo sapiens
aaacctgaattccaatgaagc

SEQ ID NO: 9218 - RNA, 21 nt, RNAi-sense strand
accugaauuccaaugaagcuu

SEQ ID NO: 9219 - RNA, 21 nt, RNAi-antisense strand
gcuucauuggaauucagguuu

SEQ ID NO: 9220 - DNA, 21 bp, Homo sapiens
aacctgaattccaatgaagcc

SEQ ID NO: 9221 - RNA, 21 nt, RNAi-sense strand
ccugaauuccaaugaagccuu

SEQ ID NO: 9222 - RNA, 21 nt, RNAi-antisense strand
ggcuucauuggaauucagguu

SEQ ID NO: 9223 - DNA, 21 bp, Homo sapiens
aattccaatgaagccatatga

SEQ ID NO: 9224 - RNA, 21 nt, RNAi-sense strand
uuccaaugaagccauaugauu

SEQ ID NO: 9225 - RNA, 21 nt, RNAi-antisense strand
ucauauggcuucauuggaauu

SEQ ID NO: 9226 - DNA, 21 bp, Homo sapiens
aatgaagccatatgaaccagc

SEQ ID NO: 9227 - RNA, 21 nt, RNAi-sense strand
ugaagccauaugaaccagcuu

SEQ ID NO: 9228 - RNA, 21 nt, RNAi-antisense strand
gcugguucauauggcuucauu

SEQ ID NO: 9229 - DNA, 21 bp, Homo sapiens
aagccatatgaaccagctgtc

SEQ ID NO: 9230 - RNA, 21 nt, RNAi-sense strand
gccauaugaaccagcugucuu

SEQ ID NO: 9231 - RNA, 21 nt, RNAi-antisense strand
gacagcugguucauauggcuu

SEQ ID NO: 9232 - DNA, 21 bp, Homo sapiens
aaccagctgtcagttgcactt

SEQ ID NO: 9233 - RNA, 21 nt, RNAi-sense strand
ccagcugucaguugcacuuuu

SEQ ID NO: 9234 - RNA, 21 nt, RNAi-antisense strand
aagugcaacugacagcugguu

SEQ ID NO: 9235 - DNA, 21 bp, Homo sapiens
aagtcttcagcaagataaaca

SEQ ID NO: 9236 - RNA, 21 nt, RNAi-sense strand
gucuucagcaagauaaacauu

SEQ ID NO: 9237 - RNA, 21 nt, RNAi-antisense strand
uguuuaucuugcugaagacuu

SEQ ID NO: 9238 - DNA, 21 bp, Homo sapiens
aacttgatggctaacttacta

SEQ ID NO: 9239 - RNA, 21 nt, RNAi-sense strand
cuugauggcuaacuuacuauu

SEQ ID NO: 9240 - RNA, 21 nt, RNAi-antisense strand
uaguaaguuagccaucaaguu

SEQ ID NO: 9241 - DNA, 21 bp, Homo sapiens
aaatgtaacttactgcgacta

SEQ ID NO: 9242 - RNA, 21 nt, RNAi-sense strand
auguaacuuacugcgacuauu

SEQ ID NO: 9243 - RNA, 21 nt, RNAi-antisense strand
uagucgcaguaaguuacauuu

SEQ ID NO: 9244 - DNA, 21 bp, Homo sapiens
aatgtaacttactgcgactaa

SEQ ID NO: 9245 - RNA, 21 nt, RNAi-sense strand
uguaacuuacugcgacuaauu

SEQ ID NO: 9246 - RNA, 21 nt, RNAi-antisense strand
uuagucgcaguaaguuacauu

SEQ ID NO: 9247 - DNA, 21 bp, Homo sapiens
aacttactgcgactaaactta

SEQ ID NO: 9248 - RNA, 21 nt, RNAi-sense strand
cuuacugcgacuaaacuuauu

SEQ ID NO: 9249 - RNA, 21 nt, RNAi-antisense strand
uaaguuuagucgcaguaaguu

SEQ ID NO: 9250 - DNA, 21 bp, Homo sapiens
caaaggccagtgcttctgtga

SEQ ID NO: 9251 - RNA, 21 nt, RNAi-sense strand
aaggccagugcuucugugauu

SEQ ID NO: 9252 - RNA, 21 nt, RNAi-antisense strand
ucacagaagcacuggccuuuu

SEQ ID NO: 9253 - DNA, 21 bp, Homo sapiens
cagaaaggattcacaggtcct

SEQ ID NO: 9254 - RNA, 21 nt, RNAi-sense strand
gaaaggauucacagguccuuu

SEQ ID NO: 9255 - RNA, 21 nt, RNAi-antisense strand
aggaccugugaauccuuucuu

SEQ ID NO: 9256 - DNA, 21 bp, Homo sapiens
cacaggtcctgaaggcttgcc

SEQ ID NO: 9257 - RNA, 21 nt, RNAi-sense strand
cagguccugaaggcuugccuu

SEQ ID NO: 9258 - RNA, 21 nt, RNAi-antisense strand
ggcaagccuucaggaccuguu

SEQ ID NO: 9259 - DNA, 21 bp, Homo sapiens
caggtcctgaaggcttgcctg

SEQ ID NO: 9260 - RNA, 21 nt, RNAi-sense strand
gguccugaaggcuugccuguu

SEQ ID NO: 9261 - RNA, 21 nt, RNAi-antisense strand
caggcaagccuucaggaccuu

SEQ ID NO: 9262 - DNA, 21 bp, Homo sapiens
caggacttccaggactcacgg

SEQ ID NO: 9263 - RNA, 21 nt, RNAi-sense strand
ggacuuccaggacucacgguu

SEQ ID NO: 9264 - RNA, 21 nt, RNAi-antisense strand
ccgugaguccuggaaguccuu

SEQ ID NO: 9265 - DNA, 21 bp, Homo sapiens
caggatgcagtggttctaagg

SEQ ID NO: 9266 - RNA, 21 nt, RNAi-sense strand
ggaugcagugguucuaagguu

SEQ ID NO: 9267 - RNA, 21 nt, RNAi-antisense strand
ccuuagaaccacugcauccuu

SEQ ID NO: 9268 - DNA, 21 bp, Homo sapiens
caccaggaacagttattgtga

SEQ ID NO: 9269 - RNA, 21 nt, RNAi-sense strand
ccaggaacaguuauugugauu

SEQ ID NO: 9270 - RNA, 21 nt, RNAi-antisense strand
ucacaauaacuguuccugguu

SEQ ID NO: 9271 - DNA, 21 bp, Homo sapiens
cagataacagaacggacctca

SEQ ID NO: 9272 - RNA, 21 nt, RNAi-sense strand
gauaacagaacggaccucauu

SEQ ID NO: 9273 - RNA, 21 nt, RNAi-antisense strand
ugagguccguucuguuaucuu

SEQ ID NO: 9274 - DNA, 21 bp, Homo sapiens
caggactgcctggagaatcat

SEQ ID NO: 9275 - RNA, 21 nt, RNAi-sense strand
ggacugccuggagaaucauuu

SEQ ID NO: 9276 - RNA, 21 nt, RNAi-antisense strand
augauucuccaggcaguccuu

SEQ ID NO: 9277 - DNA, 21 bp, Homo sapiens
caggatttcgtggtccaacag

SEQ ID NO: 9278 - RNA, 21 nt, RNAi-sense strand
ggauuucgugguccaacaguu

SEQ ID NO: 9279 - RNA, 21 nt, RNAi-antisense strand
cuguuggaccacgaaauccuu

SEQ ID NO: 9280 - DNA, 21 bp, Homo sapiens
cagaatattatgacacatacc

SEQ ID NO: 9281 - RNA, 21 nt, RNAi-sense strand
gaauauuaugacacauaccuu

SEQ ID NO: 9282 - RNA, 21 nt, RNAi-antisense strand
gguaugugucauaauauucuu

SEQ ID NO: 9283 - DNA, 21 bp, Homo sapiens
catcaaggcctggcctcagag

SEQ ID NO: 9284 - RNA, 21 nt, RNAi-sense strand
ucaaggccuggccucagaguu

SEQ ID NO: 9285 - RNA, 21 nt, RNAi-antisense strand
cucugaggccaggccuugauu

SEQ ID NO: 9286 - DNA, 21 bp, Homo sapiens
caggcttgaaaggaagtaaag

SEQ ID NO: 9287 - RNA, 21 nt, RNAi-sense strand
ggcuugaaaggaaguaaaguu

SEQ ID NO: 9288 - RNA, 21 nt, RNAi-antisense strand
cuuuacuuccuuucaagccuu

SEQ ID NO: 9289 - DNA, 21 bp, Homo sapiens
caggttgtgctggttcaccag

SEQ ID NO: 9290 - RNA, 21 nt, RNAi-sense strand
gguugugcugguucaccaguu

SEQ ID NO: 9291 - RNA, 21 nt, RNAi-antisense strand
cuggugaaccagcacaaccuu

SEQ ID NO: 9292 - DNA, 21 bp, Homo sapiens
caccaggtcttccaggatcac

SEQ ID NO: 9293 - RNA, 21 nt, RNAi-sense strand
ccaggucuuccaggaucacuu

SEQ ID NO: 9294 - RNA, 21 nt, RNAi-antisense strand
gugauccuggaagaccugguu

SEQ ID NO: 9295 - DNA, 21 bp, Homo sapiens
caggtcttccaggatcaccgg

SEQ ID NO: 9296 - RNA, 21 nt, RNAi-sense strand
ggucuuccaggaucaccgguu

SEQ ID NO: 9297 - RNA, 21 nt, RNAi-antisense strand
ccggugauccuggaagaccuu

SEQ ID NO: 9298 - DNA, 21 bp, Homo sapiens
cacctggagatcacggactgc

SEQ ID NO: 9299 - RNA, 21 nt, RNAi-sense strand
ccuggagaucacggacugcuu

SEQ ID NO: 9300 - RNA, 21 nt, RNAi-antisense strand
gcaguccgugaucuccagguu

SEQ ID NO: 9301 - DNA, 21 bp, Homo sapiens
cacggactgccaggctatcta

SEQ ID NO: 9302 - RNA, 21 nt, RNAi-sense strand
cggacugccaggcuaucuauu

SEQ ID NO: 9303 - RNA, 21 nt, RNAi-antisense strand
uagauagccuggcaguccguu

SEQ ID NO: 9304 - DNA, 21 bp, Homo sapiens
caaaggagaaccaggcctcct

SEQ ID NO: 9305 - RNA, 21 nt, RNAi-sense strand
aaggagaaccaggccuccuuu

SEQ ID NO: 9306 - RNA, 21 nt, RNAi-antisense strand
aggaggccugguucuccuuuu

SEQ ID NO: 9307 - DNA, 21 bp, Homo sapiens
caggcctcctgtgtacacagt

SEQ ID NO: 9308 - RNA, 21 nt, RNAi-sense strand
ggccuccuguguacacaguuu

SEQ ID NO: 9309 - RNA, 21 nt, RNAi-antisense strand
acuguguacacaggaggccuu

SEQ ID NO: 9310 - DNA, 21 bp, Homo sapiens
caggaagacaaggcgcagctg

SEQ ID NO: 9311 - RNA, 21 nt, RNAi-sense strand
ggaagacaaggcgcagcuguu

SEQ ID NO: 9312 - RNA, 21 nt, RNAi-antisense strand
cagcugcgccuugucuuccuu

SEQ ID NO: 9313 - DNA, 21 bp, Homo sapiens
caaggcgcagctggcttgaaa

SEQ ID NO: 9314 - RNA, 21 nt, RNAi-sense strand
aggcgcagcuggcuugaaauu

SEQ ID NO: 9315 - RNA, 21 nt, RNAi-antisense strand
uuucaagccagcugcgccuuu

SEQ ID NO: 9316 - DNA, 21 bp, Homo sapiens
cagctggcttgaaaggaagcc

SEQ ID NO: 9317 - RNA, 21 nt, RNAi-sense strand
gcuggcuugaaaggaagccuu

SEQ ID NO: 9318 - RNA, 21 nt, RNAi-antisense strand
ggcuuccuuucaagccagcuu

SEQ ID NO: 9319 - DNA, 21 bp, Homo sapiens
caggaaatacaggtcttccag

SEQ ID NO: 9320 - RNA, 21 nt, RNAi-sense strand
ggaaauacaggucuuccaguu

SEQ ID NO: 9321 - RNA, 21 nt, RNAi-antisense strand
cuggaagaccuguauuuccuu

SEQ ID NO: 9322 - DNA, 21 bp, Homo sapiens
caggtcttccaggatttccag

SEQ ID NO: 9323 - RNA, 21 nt, RNAi-sense strand
ggucuuccaggauuuccaguu

SEQ ID NO: 9324 - RNA, 21 nt, RNAi-antisense strand
cuggaaauccuggaagaccuu

SEQ ID NO: 9325 - DNA, 21 bp, Homo sapiens
caggacctaaaggcgaactgg

SEQ ID NO: 9326 - RNA, 21 nt, RNAi-sense strand
ggaccuaaaggcgaacugguu

SEQ ID NO: 9327 - RNA, 21 nt, RNAi-antisense strand
ccaguucgccuuuagguccuu

SEQ ID NO: 9328 - DNA, 21 bp, Homo sapiens
caaggagaacctggtctccag

SEQ ID NO: 9329 - RNA, 21 nt, RNAi-sense strand
aggagaaccuggucuccaguu

SEQ ID NO: 9330 - RNA, 21 nt, RNAi-antisense strand
cuggagaccagguucuccuuu

SEQ ID NO: 9331 - DNA, 21 bp, Homo sapiens
cagtgtttcaacaccagttcc

SEQ ID NO: 9332 - RNA, 21 nt, RNAi-sense strand
guguuucaacaccaguuccuu

SEQ ID NO: 9333 - RNA, 21 nt, RNAi-antisense strand
ggaacugguguugaaacacuu

SEQ ID NO: 9334 - DNA, 21 bp, Homo sapiens
caggaattccaggaattggat

SEQ ID NO: 9335 - RNA, 21 nt, RNAi-sense strand
ggaauuccaggaauuggauuu

SEQ ID NO: 9336 - RNA, 21 nt, RNAi-antisense strand
auccaauuccuggaauuccuu

SEQ ID NO: 9337 - DNA, 21 bp, Homo sapiens
cagcagtagccatgcctggag

SEQ ID NO: 9338 - RNA, 21 nt, RNAi-sense strand
gcaguagccaugccuggaguu

SEQ ID NO: 9339 - RNA, 21 nt, RNAi-antisense strand
cuccaggcauggcuacugcuu

SEQ ID NO: 9340 - DNA, 21 bp, Homo sapiens
cagtagccatgcctggaggac

SEQ ID NO: 9341 - RNA, 21 nt, RNAi-sense strand
guagccaugccuggaggacuu

SEQ ID NO: 9342 - RNA, 21 nt, RNAi-antisense strand
guccuccaggcauggcuacuu

SEQ ID NO: 9343 - DNA, 21 bp, Homo sapiens
catgcctggaggaccaggaac

SEQ ID NO: 9344 - RNA, 21 nt, RNAi-sense strand
ugccuggaggaccaggaacuu

SEQ ID NO: 9345 - RNA, 21 nt, RNAi-antisense strand
guuccugguccuccaggcauu

SEQ ID NO: 9346 - DNA, 21 bp, Homo sapiens
caggagaaagaggcaattctg

SEQ ID NO: 9347 - RNA, 21 nt, RNAi-sense strand
ggagaaagaggcaauucuguu

SEQ ID NO: 9348 - RNA, 21 nt, RNAi-antisense strand
cagaauugccucuuucuccuu

SEQ ID NO: 9349 - DNA, 21 bp, Homo sapiens
cagcctggaccacctggagaa

SEQ ID NO: 9350 - RNA, 21 nt, RNAi-sense strand
gccuggaccaccuggagaauu

SEQ ID NO: 9351 - RNA, 21 nt, RNAi-antisense strand
uucuccaggugguccaggcuu

SEQ ID NO: 9352 - DNA, 21 bp, Homo sapiens
caaggacttccaggcttaaat

SEQ ID NO: 9353 - RNA, 21 nt, RNAi-sense strand
aggacuuccaggcuuaaauuu

SEQ ID NO: 9354 - RNA, 21 nt, RNAi-antisense strand
auuuaagccuggaaguccuuu

SEQ ID NO: 9355 - DNA, 21 bp, Homo sapiens
caggcttaaatggattgaaag

SEQ ID NO: 9356 - RNA, 21 nt, RNAi-sense strand
ggcuuaaauggauugaaaguu

SEQ ID NO: 9357 - RNA, 21 nt, RNAi-antisense strand
cuuucaauccauuuaagccuu

SEQ ID NO: 9358 - DNA, 21 bp, Homo sapiens
caacaaggcagaagaggtaaa

SEQ ID NO: 9359 - RNA, 21 nt, RNAi-sense strand
acaaggcagaagagguaaauu

SEQ ID NO: 9360 - RNA, 21 nt, RNAi-antisense strand
uuuaccucuucugccuuguuu

SEQ ID NO: 9361 - DNA, 21 bp, Homo sapiens
caggaattccaggcttggata

SEQ ID NO: 9362 - RNA, 21 nt, RNAi-sense strand
ggaauuccaggcuuggauauu

SEQ ID NO: 9363 - RNA, 21 nt, RNAi-antisense strand
uauccaagccuggaauuccuu

SEQ ID NO: 9364 - DNA, 21 bp, Homo sapiens
caggcttggatagatcaggat

SEQ ID NO: 9365 - RNA, 21 nt, RNAi-sense strand
ggcuuggauagaucaggauuu

SEQ ID NO: 9366 - RNA, 21 nt, RNAi-antisense strand
auccugaucuauccaagccuu

SEQ ID NO: 9367 - DNA, 21 bp, Homo sapiens
caggatttcctggagaaactg

SEQ ID NO: 9368 - RNA, 21 nt, RNAi-sense strand
ggauuuccuggagaaacuguu

SEQ ID NO: 9369 - RNA, 21 nt, RNAi-antisense strand
caguuucuccaggaaauccuu

SEQ ID NO: 9370 - DNA, 21 bp, Homo sapiens
caccaggaattccaggtcatc

SEQ ID NO: 9371 - RNA, 21 nt, RNAi-sense strand
ccaggaauuccaggucaucuu

SEQ ID NO: 9372 - RNA, 21 nt, RNAi-antisense strand
gaugaccuggaauuccugguu

SEQ ID NO: 9373 - DNA, 21 bp, Homo sapiens
caggaattccaggtcatcaag

SEQ ID NO: 9374 - RNA, 21 nt, RNAi-sense strand
ggaauuccaggucaucaaguu

SEQ ID NO: 9375 - RNA, 21 nt, RNAi-antisense strand
cuugaugaccuggaauuccuu

SEQ ID NO: 9376 - DNA, 21 bp, Homo sapiens
caggtcatcaaggtgaaatgg

SEQ ID NO: 9377 - RNA, 21 nt, RNAi-sense strand
ggucaucaaggugaaaugguu

SEQ ID NO: 9378 - RNA, 21 nt, RNAi-antisense strand
ccauuucaccuugaugaccuu

SEQ ID NO: 9379 - DNA, 21 bp, Homo sapiens
caaagaggatatccaggaaat

SEQ ID NO: 9380 - RNA, 21 nt, RNAi-sense strand
aagaggauauccaggaaauuu

SEQ ID NO: 9381 - RNA, 21 nt, RNAi-antisense strand
auuuccuggauauccucuuuu

SEQ ID NO: 9382 - DNA, 21 bp, Homo sapiens
caccaggtgaagatggagtga

SEQ ID NO: 9383 - RNA, 21 nt, RNAi-sense strand
ccaggugaagauggagugauu

SEQ ID NO: 9384 - RNA, 21 nt, RNAi-antisense strand
ucacuccaucuucaccugguu

SEQ ID NO: 9385 - DNA, 21 bp, Homo sapiens
caggtgaagatggagtgattg

SEQ ID NO: 9386 - RNA, 21 nt, RNAi-sense strand
ggugaagauggagugauuguu

SEQ ID NO: 9387 - RNA, 21 nt, RNAi-antisense strand
caaucacuccaucuucaccuu

SEQ ID NO: 9388 - DNA, 21 bp, Homo sapiens
caaaggagaaccaggtctcaa

SEQ ID NO: 9389 - RNA, 21 nt, RNAi-sense strand
aaggagaaccaggucucaauu

SEQ ID NO: 9390 - RNA, 21 nt, RNAi-antisense strand
uugagaccugguucuccuuuu

SEQ ID NO: 9391 - DNA, 21 bp, Homo sapiens
caggtctcaaaggattcgcag

SEQ ID NO: 9392 - RNA, 21 nt, RNAi-sense strand
ggucucaaaggauucgcaguu

SEQ ID NO: 9393 - RNA, 21 nt, RNAi-antisense strand
cugcgaauccuuugagaccuu

SEQ ID NO: 9394 - DNA, 21 bp, Homo sapiens
caaaggattcgcaggaaatcc

SEQ ID NO: 9395 - RNA, 21 nt, RNAi-sense strand
aaggauucgcaggaaauccuu

SEQ ID NO: 9396 - RNA, 21 nt, RNAi-antisense strand
ggauuuccugcgaauccuuuu

SEQ ID NO: 9397 - DNA, 21 bp, Homo sapiens
caggaaatccaggtgagaaag

SEQ ID NO: 9398 - RNA, 21 nt, RNAi-sense strand
ggaaauccaggugagaaaguu

SEQ ID NO: 9399 - RNA, 21 nt, RNAi-antisense strand
cuuucucaccuggauuuccuu

SEQ ID NO: 9400 - DNA, 21 bp, Homo sapiens
caggtgagaaaggaaacagag

SEQ ID NO: 9401 - RNA, 21 nt, RNAi-sense strand
ggugagaaaggaaacagaguu

SEQ ID NO: 9402 - RNA, 21 nt, RNAi-antisense strand
cucuguuuccuuucucaccuu

SEQ ID NO: 9403 - DNA, 21 bp, Homo sapiens
caggactccgtggtataccag

SEQ ID NO: 9404 - RNA, 21 nt, RNAi-sense strand
ggacuccgugguauaccaguu

SEQ ID NO: 9405 - RNA, 21 nt, RNAi-antisense strand
cugguauaccacggaguccuu

SEQ ID NO: 9406 - DNA, 21 bp, Homo sapiens
catgccaggttctaaaggaaa

SEQ ID NO: 9407 - RNA, 21 nt, RNAi-sense strand
ugccagguucuaaaggaaauu

SEQ ID NO: 9408 - RNA, 21 nt, RNAi-antisense strand
uuuccuuuagaaccuggcauu

SEQ ID NO: 9409 - DNA, 21 bp, Homo sapiens
caggtcgagcaggaagaccag

SEQ ID NO: 9410 - RNA, 21 nt, RNAi-sense strand
ggucgagcaggaagaccaguu

SEQ ID NO: 9411 - RNA, 21 nt, RNAi-antisense strand
cuggucuuccugcucgaccuu

SEQ ID NO: 9412 - DNA, 21 bp, Homo sapiens
caggtattcatggtctccagg

SEQ ID NO: 9413 - RNA, 21 nt, RNAi-sense strand
gguauucauggucuccagguu

SEQ ID NO: 9414 - RNA, 21 nt, RNAi-antisense strand
ccuggagaccaugaauaccuu

SEQ ID NO: 9415 - DNA, 21 bp, Homo sapiens
caggttattcagaaggtacaa

SEQ ID NO: 9416 - RNA, 21 nt, RNAi-sense strand
gguuauucagaagguacaauu

SEQ ID NO: 9417 - RNA, 21 nt, RNAi-antisense strand
uuguaccuucugaauaaccuu

SEQ ID NO: 9418 - DNA, 21 bp, Homo sapiens
cagaaggtacaaggccaggac

SEQ ID NO: 9419 - RNA, 21 nt, RNAi-sense strand
gaagguacaaggccaggacuu

SEQ ID NO: 9420 - RNA, 21 nt, RNAi-antisense strand
guccuggccuuguaccuucuu

SEQ ID NO: 9421 - DNA, 21 bp, Homo sapiens
caggaaagccaggtcctcatg

SEQ ID NO: 9422 - RNA, 21 nt, RNAi-sense strand
ggaaagccagguccucauguu

SEQ ID NO: 9423 - RNA, 21 nt, RNAi-antisense strand
caugaggaccuggcuuuccuu

SEQ ID NO: 9424 - DNA, 21 bp, Homo sapiens
caggtcctcatggtgatttgg

SEQ ID NO: 9425 - RNA, 21 nt, RNAi-sense strand
gguccucauggugauuugguu

SEQ ID NO: 9426 - RNA, 21 nt, RNAi-antisense strand
ccaaaucaccaugaggaccuu

SEQ ID NO: 9427 - DNA, 21 bp, Homo sapiens
caggtcttccaggatttccag

SEQ ID NO: 9428 - RNA, 21 nt, RNAi-sense strand
ggucuuccaggauuuccaguu

SEQ ID NO: 9429 - RNA, 21 nt, RNAi-antisense strand
cuggaaauccuggaagaccuu

SEQ ID NO: 9430 - DNA, 21 bp, Homo sapiens
caggatttccaggatctcctg

SEQ ID NO: 9431 - RNA, 21 nt, RNAi-sense strand
ggauuuccaggaucuccuguu

SEQ ID NO: 9432 - RNA, 21 nt, RNAi-antisense strand
caggagauccuggaaauccuu

SEQ ID NO: 9433 - DNA, 21 bp, Homo sapiens
caggatctcctggaccaatgg

SEQ ID NO: 9434 - RNA, 21 nt, RNAi-sense strand
ggaucuccuggaccaaugguu

SEQ ID NO: 9435 - RNA, 21 nt, RNAi-antisense strand
ccauugguccaggagauccuu

SEQ ID NO: 9436 - DNA, 21 bp, Homo sapiens
caaggacgtgatggaattcct

SEQ ID NO: 9437 - RNA, 21 nt, RNAi-sense strand
aggacgugauggaauuccuuu

SEQ ID NO: 9438 - RNA, 21 nt, RNAi-antisense strand
aggaauuccaucacguccuuu

SEQ ID NO: 9439 - DNA, 21 bp, Homo sapiens
caaggagccaaaggagacagg

SEQ ID NO: 9440 - RNA, 21 nt, RNAi-sense strand
aggagccaaaggagacagguu

SEQ ID NO: 9441 - RNA, 21 nt, RNAi-antisense strand
ccugucuccuuuggcuccuuu

SEQ ID NO: 9442 - DNA, 21 bp, Homo sapiens
cagacaggaaatcgtggtcca

SEQ ID NO: 9443 - RNA, 21 nt, RNAi-sense strand
gacaggaaaucgugguccauu

SEQ ID NO: 9444 - RNA, 21 nt, RNAi-antisense strand
uggaccacgauuuccugucuu

SEQ ID NO: 9445 - DNA, 21 bp, Homo sapiens
caggaaatcgtggtccaccag

SEQ ID NO: 9446 - RNA, 21 nt, RNAi-sense strand
ggaaaucgugguccaccaguu

SEQ ID NO: 9447 - RNA, 21 nt, RNAi-antisense strand
cugguggaccacgauuuccuu

SEQ ID NO: 9448 - DNA, 21 bp, Homo sapiens
caccaggctcaagaggaagcc

SEQ ID NO: 9449 - RNA, 21 nt, RNAi-sense strand
ccaggcucaagaggaagccuu

SEQ ID NO: 9450 - RNA, 21 nt, RNAi-antisense strand
ggcuuccucuugagccugguu

SEQ ID NO: 9451 - DNA, 21 bp, Homo sapiens
cacctggaactgcaggagaca

SEQ ID NO: 9452 - RNA, 21 nt, RNAi-sense strand
ccuggaacugcaggagacauu

SEQ ID NO: 9453 - RNA, 21 nt, RNAi-antisense strand
ugucuccugcaguuccagguu

SEQ ID NO: 9454 - DNA, 21 bp, Homo sapiens
caccaggtactccaggtcttc

SEQ ID NO: 9455 - RNA, 21 nt, RNAi-sense strand
ccagguacuccaggucuucuu

SEQ ID NO: 9456 - RNA, 21 nt, RNAi-antisense strand
gaagaccuggaguaccugguu

SEQ ID NO: 9457 - DNA, 21 bp, Homo sapiens
caggtactccaggtcttccag

SEQ ID NO: 9458 - RNA, 21 nt, RNAi-sense strand
gguacuccaggucuuccaguu

SEQ ID NO: 9459 - RNA, 21 nt, RNAi-antisense strand
cuggaagaccuggaguaccuu

SEQ ID NO: 9460 - DNA, 21 bp, Homo sapiens
cagaggtgatcctggattcca

SEQ ID NO: 9461 - RNA, 21 nt, RNAi-sense strand
gaggugauccuggauuccauu

SEQ ID NO: 9462 - RNA, 21 nt, RNAi-antisense strand
uggaauccaggaucaccucuu

SEQ ID NO: 9463 - DNA, 21 bp, Homo sapiens
cattggacctccaggaccaat

SEQ ID NO: 9464 - RNA, 21 nt, RNAi-sense strand
uuggaccuccaggaccaauuu

SEQ ID NO: 9465 - RNA, 21 nt, RNAi-antisense strand
auugguccuggagguccaauu

SEQ ID NO: 9466 - DNA, 21 bp, Homo sapiens
cacctggtgtacgtggagacc

SEQ ID NO: 9467 - RNA, 21 nt, RNAi-sense strand
ccugguguacguggagaccuu

SEQ ID NO: 9468 - RNA, 21 nt, RNAi-antisense strand
ggucuccacguacaccagguu

SEQ ID NO: 9469 - DNA, 21 bp, Homo sapiens
cacctggcacacctggagaac

SEQ ID NO: 9470 - RNA, 21 nt, RNAi-sense strand
ccuggcacaccuggagaacuu

SEQ ID NO: 9471 - RNA, 21 nt, RNAi-antisense strand
guucuccaggugugccagguu

SEQ ID NO: 9472 - DNA, 21 bp, Homo sapiens
caagaggtaagccaggcaagg

SEQ ID NO: 9473 - RNA, 21 nt, RNAi-sense strand
agagguaagccaggcaagguu

SEQ ID NO: 9474 - RNA, 21 nt, RNAi-antisense strand
ccuugccuggcuuaccucuuu

SEQ ID NO: 9475 - DNA, 21 bp, Homo sapiens
caggaactcctggaccagctg

SEQ ID NO: 9476 - RNA, 21 nt, RNAi-sense strand
ggaacuccuggaccagcuguu

SEQ ID NO: 9477 - RNA, 21 nt, RNAi-antisense strand
cagcugguccaggaguuccuu

SEQ ID NO: 9478 - DNA, 21 bp, Homo sapiens
caacaaaggttctaaaggaga

SEQ ID NO: 9479 - RNA, 21 nt, RNAi-sense strand
acaaagguucuaaaggagauu

SEQ ID NO: 9480 - RNA, 21 nt, RNAi-antisense strand
ucuccuuuagaaccuuuguuu

SEQ ID NO: 9481 - DNA, 21 bp, Homo sapiens
caaaggttctaaaggagagcc

SEQ ID NO: 9482 - RNA, 21 nt, RNAi-sense strand
aagguucuaaaggagagccuu

SEQ ID NO: 9483 - RNA, 21 nt, RNAi-antisense strand
ggcucuccuuuagaaccuuuu

SEQ ID NO: 9484 - DNA, 21 bp, Homo sapiens
caggaccagctggatcagatg

SEQ ID NO: 9485 - RNA, 21 nt, RNAi-sense strand
ggaccagcuggaucagauguu

SEQ ID NO: 9486 - RNA, 21 nt, RNAi-antisense strand
caucugauccagcugguccuu

SEQ ID NO: 9487 - DNA, 21 bp, Homo sapiens
cagctggatcagatggattgc

SEQ ID NO: 9488 - RNA, 21 nt, RNAi-sense strand
gcuggaucagauggauugcuu

SEQ ID NO: 9489 - RNA, 21 nt, RNAi-antisense strand
gcaauccaucugauccagcuu

SEQ ID NO: 9490 - DNA, 21 bp, Homo sapiens
cagatggattgccaggtttga

SEQ ID NO: 9491 - RNA, 21 nt, RNAi-sense strand
gauggauugccagguuugauu

SEQ ID NO: 9492 - RNA, 21 nt, RNAi-antisense strand
ucaaaccuggcaauccaucuu

SEQ ID NO: 9493 - DNA, 21 bp, Homo sapiens
cagtggatcacctgcaacctg

SEQ ID NO: 9494 - RNA, 21 nt, RNAi-sense strand
guggaucaccugcaaccuguu

SEQ ID NO: 9495 - RNA, 21 nt, RNAi-antisense strand
cagguugcaggugauccacuu

SEQ ID NO: 9496 - DNA, 21 bp, Homo sapiens
cacctgcaacctggacaacga

SEQ ID NO: 9497 - RNA, 21 nt, RNAi-sense strand
ccugcaaccuggacaacgauu

SEQ ID NO: 9498 - RNA, 21 nt, RNAi-antisense strand
ucguuguccagguugcagguu

SEQ ID NO: 9499 - DNA, 21 bp, Homo sapiens
caacctggacaacgagaggct

SEQ ID NO: 9500 - RNA, 21 nt, RNAi-sense strand
accuggacaacgagaggcuuu

SEQ ID NO: 9501 - RNA, 21 nt, RNAi-antisense strand
agccucucguuguccagguuu

SEQ ID NO: 9502 - DNA, 21 bp, Homo sapiens
caacgagaggctttgtcttca

SEQ ID NO: 9503 - RNA, 21 nt, RNAi-sense strand
acgagaggcuuugucuucauu

SEQ ID NO: 9504 - RNA, 21 nt, RNAi-antisense strand
ugaagacaaagccucucguuu

SEQ ID NO: 9505 - DNA, 21 bp, Homo sapiens
cacagtcaaaccacagcaatt

SEQ ID NO: 9506 - RNA, 21 nt, RNAi-sense strand
cagucaaaccacagcaauuuu

SEQ ID NO: 9507 - RNA, 21 nt, RNAi-antisense strand
aauugcugugguuugacuguu

SEQ ID NO: 9508 - DNA, 21 bp, Homo sapiens
cagtcaaaccacagcaattcc

SEQ ID NO: 9509 - RNA, 21 nt, RNAi-sense strand
gucaaaccacagcaauuccuu

SEQ ID NO: 9510 - RNA, 21 nt, RNAi-antisense strand
ggaauugcugugguuugacuu

SEQ ID NO: 9511 - DNA, 21 bp, Homo sapiens
caaaccacagcaattccttca

SEQ ID NO: 9512 - RNA, 21 nt, RNAi-sense strand
aaccacagcaauuccuucauu

SEQ ID NO: 9513 - RNA, 21 nt, RNAi-antisense strand
ugaaggaauugcugugguuuu

SEQ ID NO: 9514 - DNA, 21 bp, Homo sapiens
cacagcaattccttcatgtcc

SEQ ID NO: 9515 - RNA, 21 nt, RNAi-sense strand
cagcaauuccuucauguccuu

SEQ ID NO: 9516 - RNA, 21 nt, RNAi-antisense strand
ggacaugaaggaauugcuguu

SEQ ID NO: 9517 - DNA, 21 bp, Homo sapiens
cagcaattccttcatgtccag

SEQ ID NO: 9518 - RNA, 21 nt, RNAi-sense strand
gcaauuccuucauguccaguu

SEQ ID NO: 9519 - RNA, 21 nt, RNAi-antisense strand
cuggacaugaaggaauugcuu

SEQ ID NO: 9520 - DNA, 21 bp, Homo sapiens
caattccttcatgtccagagg

SEQ ID NO: 9521 - RNA, 21 nt, RNAi-sense strand
auuccuucauguccagagguu

SEQ ID NO: 9522 - RNA, 21 nt, RNAi-antisense strand
ccucuggacaugaaggaauuu

SEQ ID NO: 9523 - DNA, 21 bp, Homo sapiens
cacggacaagaccttggaact

SEQ ID NO: 9524 - RNA, 21 nt, RNAi-sense strand
cggacaagaccuuggaacuuu

SEQ ID NO: 9525 - RNA, 21 nt, RNAi-antisense strand
aguuccaaggucuuguccguu

SEQ ID NO: 9526 - DNA, 21 bp, Homo sapiens
caagaccttggaactcttggc

SEQ ID NO: 9527 - RNA, 21 nt, RNAi-sense strand
agaccuuggaacucuuggcuu

SEQ ID NO: 9528 - RNA, 21 nt, RNAi-antisense strand
gccaagaguuccaaggucuuu

SEQ ID NO: 9529 - DNA, 21 bp, Homo sapiens
cagctgcctgcagcgatttac

SEQ ID NO: 9530 - RNA, 21 nt, RNAi-sense strand
gcugccugcagcgauuuacuu

SEQ ID NO: 9531 - RNA, 21 nt, RNAi-antisense strand
guaaaucgcugcaggcagcuu

SEQ ID NO: 9532 - DNA, 21 bp, Homo sapiens
cagcgatttaccacaatgcca

SEQ ID NO: 9533 - RNA, 21 nt, RNAi-sense strand
gcgauuuaccacaaugccauu

SEQ ID NO: 9534 - RNA, 21 nt, RNAi-antisense strand
uggcauugugguaaaucgcuu

SEQ ID NO: 9535 - DNA, 21 bp, Homo sapiens
cacaatgccattcttattctg

SEQ ID NO: 9536 - RNA, 21 nt, RNAi-sense strand
caaugccauucuuauucuguu

SEQ ID NO: 9537 - RNA, 21 nt, RNAi-antisense strand
cagaauaagaauggcauuguu

SEQ ID NO: 9538 - DNA, 21 bp, Homo sapiens
caatgccattcttattctgca

SEQ ID NO: 9539 - RNA, 21 nt, RNAi-sense strand
augccauucuuauucugcauu

SEQ ID NO: 9540 - RNA, 21 nt, RNAi-antisense strand
ugcagaauaagaauggcauuu

SEQ ID NO: 9541 - DNA, 21 bp, Homo sapiens
cattcttattctgcaatgtca

SEQ ID NO: 9542 - RNA, 21 nt, RNAi-sense strand
uucuuauucugcaaugucauu

SEQ ID NO: 9543 - RNA, 21 nt, RNAi-antisense strand
ugacauugcagaauaagaauu

SEQ ID NO: 9544 - DNA, 21 bp, Homo sapiens
catactggctgtcaacaccag

SEQ ID NO: 9545 - RNA, 21 nt, RNAi-sense strand
uacuggcugucaacaccaguu

SEQ ID NO: 9546 - RNA, 21 nt, RNAi-antisense strand
cugguguugacagccaguauu

SEQ ID NO: 9547 - DNA, 21 bp, Homo sapiens
caacaccagctctgatgccaa

SEQ ID NO: 9548 - RNA, 21 nt, RNAi-sense strand
acaccagcucugaugccaauu

SEQ ID NO: 9549 - RNA, 21 nt, RNAi-antisense strand
uuggcaucagagcugguguuu

SEQ ID NO: 9550 - DNA, 21 bp, Homo sapiens
caccagctctgatgccaatga

SEQ ID NO: 9551 - RNA, 21 nt, RNAi-sense strand
ccagcucugaugccaaugauu

SEQ ID NO: 9552 - RNA, 21 nt, RNAi-antisense strand
ucauuggcaucagagcugguu

SEQ ID NO: 9553 - DNA, 21 bp, Homo sapiens
cagctctgatgccaatgaaca

SEQ ID NO: 9554 - RNA, 21 nt, RNAi-sense strand
gcucugaugccaaugaacauu

SEQ ID NO: 9555 - RNA, 21 nt, RNAi-antisense strand
uguucauuggcaucagagcuu

SEQ ID NO: 9556 - DNA, 21 bp, Homo sapiens
cagatgcactgtttgtgaagg

SEQ ID NO: 9557 - RNA, 21 nt, RNAi-sense strand
gaugcacuguuugugaagguu

SEQ ID NO: 9558 - RNA, 21 nt, RNAi-antisense strand
ccuucacaaacagugcaucuu

SEQ ID NO: 9559 - DNA, 21 bp, Homo sapiens
cactgtttgtgaaggtcctgc

SEQ ID NO: 9560 - RNA, 21 nt, RNAi-sense strand
cuguuugugaagguccugcuu

SEQ ID NO: 9561 - RNA, 21 nt, RNAi-antisense strand
gcaggaccuucacaaacaguu

SEQ ID NO: 9562 - DNA, 21 bp, Homo sapiens
catagccgttcacagccaaac

SEQ ID NO: 9563 - RNA, 21 nt, RNAi-sense strand
uagccguucacagccaaacuu

SEQ ID NO: 9564 - RNA, 21 nt, RNAi-antisense strand
guuuggcugugaacggcuauu

SEQ ID NO: 9565 - DNA, 21 bp, Homo sapiens
cacagccaaaccactgacatt

SEQ ID NO: 9566 - RNA, 21 nt, RNAi-sense strand
cagccaaaccacugacauuuu

SEQ ID NO: 9567 - RNA, 21 nt, RNAi-antisense strand
aaugucagugguuuggcuguu

SEQ ID NO: 9568 - DNA, 21 bp, Homo sapiens
cagccaaaccactgacattcc

SEQ ID NO: 9569 - RNA, 21 nt, RNAi-sense strand
gccaaaccacugacauuccuu

SEQ ID NO: 9570 - RNA, 21 nt, RNAi-antisense strand
ggaaugucagugguuuggcuu

SEQ ID NO: 9571 - DNA, 21 bp, Homo sapiens
caaaccactgacattcctcca

SEQ ID NO: 9572 - RNA, 21 nt, RNAi-sense strand
aaccacugacauuccuccauu

SEQ ID NO: 9573 - RNA, 21 nt, RNAi-antisense strand
uggaggaaugucagugguuuu

SEQ ID NO: 9574 - DNA, 21 bp, Homo sapiens
cactgacattcctccatgtcc

SEQ ID NO: 9575 - RNA, 21 nt, RNAi-sense strand
cugacauuccuccauguccuu

SEQ ID NO: 9576 - RNA, 21 nt, RNAi-antisense strand
ggacauggaggaaugucaguu

SEQ ID NO: 9577 - DNA, 21 bp, Homo sapiens
cattcctccatgtcctcacgg

SEQ ID NO: 9578 - RNA, 21 nt, RNAi-sense strand
uuccuccauguccucacgguu

SEQ ID NO: 9579 - RNA, 21 nt, RNAi-antisense strand
ccgugaggacauggaggaauu

SEQ ID NO: 9580 - DNA, 21 bp, Homo sapiens
catgtcctcacggctggattt

SEQ ID NO: 9581 - RNA, 21 nt, RNAi-sense strand
uguccucacggcuggauuuuu

SEQ ID NO: 9582 - RNA, 21 nt, RNAi-antisense strand
aaauccagccgugaggacauu

SEQ ID NO: 9583 - DNA, 21 bp, Homo sapiens
cacggctggatttctctctgg

SEQ ID NO: 9584 - RNA, 21 nt, RNAi-sense strand
cggcuggauuucucucugguu

SEQ ID NO: 9585 - RNA, 21 nt, RNAi-antisense strand
ccagagagaaauccagccguu

SEQ ID NO: 9586 - DNA, 21 bp, Homo sapiens
cattcatcatgaaagcctatt

SEQ ID NO: 9587 - RNA, 21 nt, RNAi-sense strand
uucaucaugaaagccuauuuu

SEQ ID NO: 9588 - RNA, 21 nt, RNAi-antisense strand
aauaggcuuucaugaugaauu

SEQ ID NO: 9589 - DNA, 21 bp, Homo sapiens
catcatgaaagcctattccat

SEQ ID NO: 9590 - RNA, 21 nt, RNAi-sense strand
ucaugaaagccuauuccauuu

SEQ ID NO: 9591 - RNA, 21 nt, RNAi-antisense strand
auggaauaggcuuucaugauu

SEQ ID NO: 9592 - DNA, 21 bp, Homo sapiens
catgaaagcctattccatcaa

SEQ ID NO: 9593 - RNA, 21 nt, RNAi-sense strand
ugaaagccuauuccaucaauu

SEQ ID NO: 9594 - RNA, 21 nt, RNAi-antisense strand
uugauggaauaggcuuucauu

SEQ ID NO: 9595 - DNA, 21 bp, Homo sapiens
caaagtaatgacagaacatgc

SEQ ID NO: 9596 - RNA, 21 nt, RNAi-sense strand
aaguaaugacagaacaugcuu

SEQ ID NO: 9597 - RNA, 21 nt, RNAi-antisense strand
gcauguucugucauuacuuuu

SEQ ID NO: 9598 - DNA, 21 bp, Homo sapiens
cagaacatgctgttatttagg

SEQ ID NO: 9599 - RNA, 21 nt, RNAi-sense strand
gaacaugcuguuauuuagguu

SEQ ID NO: 9600 - RNA, 21 nt, RNAi-antisense strand
ccuaaauaacagcauguucuu

SEQ ID NO: 9601 - DNA, 21 bp, Homo sapiens
caaacaatattgctccatgat

SEQ ID NO: 9602 - RNA, 21 nt, RNAi-sense strand
aacaauauugcuccaugauuu

SEQ ID NO: 9603 - RNA, 21 nt, RNAi-antisense strand
aucauggagcaauauuguuuu

SEQ ID NO: 9604 - DNA, 21 bp, Homo sapiens
caatattgctccatgatgact

SEQ ID NO: 9605 - RNA, 21 nt, RNAi-sense strand
auauugcuccaugaugacuuu

SEQ ID NO: 9606 - RNA, 21 nt, RNAi-antisense strand
agucaucauggagcaauauuu

SEQ ID NO: 9607 - DNA, 21 bp, Homo sapiens
catgatgacttagtacaaagt

SEQ ID NO: 9608 - RNA, 21 nt, RNAi-sense strand
ugaugacuuaguacaaaguuu

SEQ ID NO: 9609 - RNA, 21 nt, RNAi-antisense strand
acuuuguacuaagucaucauu

SEQ ID NO: 9610 - DNA, 21 bp, Homo sapiens
caaagcaattctttcaagtgc

SEQ ID NO: 9611 - RNA, 21 nt, RNAi-sense strand
aagcaauucuuucaagugcuu

SEQ ID NO: 9612 - RNA, 21 nt, RNAi-antisense strand
gcacuugaaagaauugcuuuu

SEQ ID NO: 9613 - DNA, 21 bp, Homo sapiens
caattctttcaagtgcagttc

SEQ ID NO: 9614 - RNA, 21 nt, RNAi-sense strand
auucuuucaagugcaguucuu

SEQ ID NO: 9615 - RNA, 21 nt, RNAi-antisense strand
gaacugcacuugaaagaauuu

SEQ ID NO: 9616 - DNA, 21 bp, Homo sapiens
caagtgcagttctgtgatctg

SEQ ID NO: 9617 - RNA, 21 nt, RNAi-sense strand
agugcaguucugugaucuguu

SEQ ID NO: 9618 - RNA, 21 nt, RNAi-antisense strand
cagaucacagaacugcacuuu

SEQ ID NO: 9619 - DNA, 21 bp, Homo sapiens
caaagttctctgtggcaaagc

SEQ ID NO: 9620 - RNA, 21 nt, RNAi-sense strand
aaguucucuguggcaaagcuu

SEQ ID NO: 9621 - RNA, 21 nt, RNAi-antisense strand
gcuuugccacagagaacuuuu

SEQ ID NO: 9622 - DNA, 21 bp, Homo sapiens
caaagcagcaactattcacaa

SEQ ID NO: 9623 - RNA, 21 nt, RNAi-sense strand
aagcagcaacuauucacaauu

SEQ ID NO: 9624 - RNA, 21 nt, RNAi-antisense strand
uugugaauaguugcugcuuuu

SEQ ID NO: 9625 - DNA, 21 bp, Homo sapiens
cacttacatccaaggcactgt

SEQ ID NO: 9626 - RNA, 21 nt, RNAi-sense strand
cuuacauccaaggcacuguuu

SEQ ID NO: 9627 - RNA, 21 nt, RNAi-antisense strand
acagugccuuggauguaaguu

SEQ ID NO: 9628 - DNA, 21 bp, Homo sapiens
catccaaggcactgtcactac

SEQ ID NO: 9629 - RNA, 21 nt, RNAi-sense strand
uccaaggcacugucacuacuu

SEQ ID NO: 9630 - RNA, 21 nt, RNAi-antisense strand
guagugacagugccuuggauu

SEQ ID NO: 9631 - DNA, 21 bp, Homo sapiens
caaggcactgtcactacggtg

SEQ ID NO: 9632 - RNA, 21 nt, RNAi-sense strand
aggcacugucacuacgguguu

SEQ ID NO: 9633 - RNA, 21 nt, RNAi-antisense strand
caccguagugacagugccuuu

SEQ ID NO: 9634 - DNA, 21 bp, Homo sapiens
cactgtcactacggtgattgt

SEQ ID NO: 9635 - RNA, 21 nt, RNAi-sense strand
cugucacuacggugauuguuu

SEQ ID NO: 9636 - RNA, 21 nt, RNAi-antisense strand
acaaucaccguagugacaguu

SEQ ID NO: 9637 - DNA, 21 bp, Homo sapiens
cactacggtgattgtatgaag

SEQ ID NO: 9638 - RNA, 21 nt, RNAi-sense strand
cuacggugauuguaugaaguu

SEQ ID NO: 9639 - RNA, 21 nt, RNAi-antisense strand
cuucauacaaucaccguaguu

SEQ ID NO: 9640 - DNA, 21 bp, Homo sapiens
cacgttatgaaatatttggcc

SEQ ID NO: 9641 - RNA, 21 nt, RNAi-sense strand
cguuaugaaauauuuggccuu

SEQ ID NO: 9642 - RNA, 21 nt, RNAi-antisense strand
ggccaaauauuucauaacguu

SEQ ID NO: 9643 - DNA, 21 bp, Homo sapiens
cacatttgtcttctttctgtc

SEQ ID NO: 9644 - RNA, 21 nt, RNAi-sense strand
cauuugucuucuuucugucuu

SEQ ID NO: 9645 - RNA, 21 nt, RNAi-antisense strand
gacagaaagaagacaaauguu

SEQ ID NO: 9646 - DNA, 21 bp, Homo sapiens
catttgtcttctttctgtctt

SEQ ID NO: 9647 - RNA, 21 nt, RNAi-sense strand
uuugucuucuuucugucuuuu

SEQ ID NO: 9648 - RNA, 21 nt, RNAi-antisense strand
aagacagaaagaagacaaauu

SEQ ID NO: 9649 - DNA, 21 bp, Homo sapiens
catgtggtatctggagcattg

SEQ ID NO: 9650 - RNA, 21 nt, RNAi-sense strand
ugugguaucuggagcauuguu

SEQ ID NO: 9651 - RNA, 21 nt, RNAi-antisense strand
caaugcuccagauaccacauu

SEQ ID NO: 9652 - DNA, 21 bp, Homo sapiens
cattgtgtatagaactggatt

SEQ ID NO: 9653 - RNA, 21 nt, RNAi-sense strand
uuguguauagaacuggauuuu

SEQ ID NO: 9654 - RNA, 21 nt, RNAi-antisense strand
aauccaguucuauacacaauu

SEQ ID NO: 9655 - DNA, 21 bp, Homo sapiens
cagacctgctgaggaccgtaa

SEQ ID NO: 9656 - RNA, 21 nt, RNAi-sense strand
gaccugcugaggaccguaauu

SEQ ID NO: 9657 - RNA, 21 nt, RNAi-antisense strand
uuacgguccucagcaggucuu

SEQ ID NO: 9658 - DNA, 21 bp, Homo sapiens
cacagaactgaactgaggttc

SEQ ID NO: 9659 - RNA, 21 nt, RNAi-sense strand
cagaacugaacugagguucuu

SEQ ID NO: 9660 - RNA, 21 nt, RNAi-antisense strand
gaaccucaguucaguucuguu

SEQ ID NO: 9661 - DNA, 21 bp, Homo sapiens
cagaactgaactgaggttcat

SEQ ID NO: 9662 - RNA, 21 nt, RNAi-sense strand
gaacugaacugagguucauuu

SEQ ID NO: 9663 - RNA, 21 nt, RNAi-antisense strand
augaaccucaguucaguucuu

SEQ ID NO: 9664 - DNA, 21 bp, Homo sapiens
caggactgtttcaaacatgcc

SEQ ID NO: 9665 - RNA, 21 nt, RNAi-sense strand
ggacuguuucaaacaugccuu

SEQ ID NO: 9666 - RNA, 21 nt, RNAi-antisense strand
ggcauguuugaaacaguccuu

SEQ ID NO: 9667 - DNA, 21 bp, Homo sapiens
cagcatacgcacacaaataac

SEQ ID NO: 9668 - RNA, 21 nt, RNAi-sense strand
gcauacgcacacaaauaacuu

SEQ ID NO: 9669 - RNA, 21 nt, RNAi-antisense strand
guuauuugugugcguaugcuu

SEQ ID NO: 9670 - DNA, 21 bp, Homo sapiens
catacgcacacaaataacaag

SEQ ID NO: 9671 - RNA, 21 nt, RNAi-sense strand
uacgcacacaaauaacaaguu

SEQ ID NO: 9672 - RNA, 21 nt, RNAi-antisense strand
cuuguuauuugugugcguauu

SEQ ID NO: 9673 - DNA, 21 bp, Homo sapiens
cactttatcctcattccataa

SEQ ID NO: 9674 - RNA, 21 nt, RNAi-sense strand
cuuuauccucauuccauaauu

SEQ ID NO: 9675 - RNA, 21 nt, RNAi-antisense strand
uuauggaaugaggauaaaguu

SEQ ID NO: 9676 - DNA, 21 bp, Homo sapiens
cattccataaatgttggtgca

SEQ ID NO: 9677 - RNA, 21 nt, RNAi-sense strand
uuccauaaauguuggugcauu

SEQ ID NO: 9678 - RNA, 21 nt, RNAi-antisense strand
ugcaccaacauuuauggaauu

SEQ ID NO: 9679 - DNA, 21 bp, Homo sapiens
cataaatgttggtgcatacct

SEQ ID NO: 9680 - RNA, 21 nt, RNAi-sense strand
uaaauguuggugcauaccuuu

SEQ ID NO: 9681 - RNA, 21 nt, RNAi-antisense strand
agguaugcaccaacauuuauu

SEQ ID NO: 9682 - DNA, 21 bp, Homo sapiens
cagttcaataatccatgaaag

SEQ ID NO: 9683 - RNA, 21 nt, RNAi-sense strand
guucaauaauccaugaaaguu

SEQ ID NO: 9684 - RNA, 21 nt, RNAi-antisense strand
cuuucauggauuauugaacuu

SEQ ID NO: 9685 - DNA, 21 bp, Homo sapiens
catgaaagaacttaaggcatt

SEQ ID NO: 9686 - RNA, 21 nt, RNAi-sense strand
ugaaagaacuuaaggcauuuu

SEQ ID NO: 9687 - RNA, 21 nt, RNAi-antisense strand
aaugccuuaaguucuuucauu

SEQ ID NO: 9688 - DNA, 21 bp, Homo sapiens
catttgttggtttatcagact

SEQ ID NO: 9689 - RNA, 21 nt, RNAi-sense strand
uuuguugguuuaucagacuuu

SEQ ID NO: 9690 - RNA, 21 nt, RNAi-antisense strand
agucugauaaaccaacaaauu

SEQ ID NO: 9691 - DNA, 21 bp, Homo sapiens
cattgctctgaatatgtcatc

SEQ ID NO: 9692 - RNA, 21 nt, RNAi-sense strand
uugcucugaauaugucaucuu

SEQ ID NO: 9693 - RNA, 21 nt, RNAi-antisense strand
gaugacauauucagagcaauu

SEQ ID NO: 9694 - DNA, 21 bp, Homo sapiens
caaaccatactgaaagagtca

SEQ ID NO: 9695 - RNA, 21 nt, RNAi-sense strand
aaccauacugaaagagucauu

SEQ ID NO: 9696 - RNA, 21 nt, RNAi-antisense strand
ugacucuuucaguaugguuuu

SEQ ID NO: 9697 - DNA, 21 bp, Homo sapiens
catactgaaagagtcattgtt

SEQ ID NO: 9698 - RNA, 21 nt, RNAi-sense strand
uacugaaagagucauuguuuu

SEQ ID NO: 9699 - RNA, 21 nt, RNAi-antisense strand
aacaaugacucuuucaguauu

SEQ ID NO: 9700 - DNA, 21 bp, Homo sapiens
caaactgtataacttggccgc

SEQ ID NO: 9701 - RNA, 21 nt, RNAi-sense strand
aacuguauaacuuggccgcuu

SEQ ID NO: 9702 - RNA, 21 nt, RNAi-antisense strand
gcggccaaguuauacaguuuu

SEQ ID NO: 9703 - DNA, 21 bp, Homo sapiens
catgttattcagcaccaagca

SEQ ID NO: 9704 - RNA, 21 nt, RNAi-sense strand
uguuauucagcaccaagcauu

SEQ ID NO: 9705 - RNA, 21 nt, RNAi-antisense strand
ugcuuggugcugaauaacauu

SEQ ID NO: 9706 - DNA, 21 bp, Homo sapiens
cagcaccaagcatgtccaggc

SEQ ID NO: 9707 - RNA, 21 nt, RNAi-sense strand
gcaccaagcauguccaggcuu

SEQ ID NO: 9708 - RNA, 21 nt, RNAi-antisense strand
gccuggacaugcuuggugcuu

SEQ ID NO: 9709 - DNA, 21 bp, Homo sapiens
caccaagcatgtccaggcact

SEQ ID NO: 9710 - RNA, 21 nt, RNAi-sense strand
ccaagcauguccaggcacuuu

SEQ ID NO: 9711 - RNA, 21 nt, RNAi-antisense strand
agugccuggacaugcuugguu

SEQ ID NO: 9712 - DNA, 21 bp, Homo sapiens
caagcatgtccaggcactgta

SEQ ID NO: 9713 - RNA, 21 nt, RNAi-sense strand
agcauguccaggcacuguauu

SEQ ID NO: 9714 - RNA, 21 nt, RNAi-antisense strand
uacagugccuggacaugcuuu

SEQ ID NO: 9715 - DNA, 21 bp, Homo sapiens
catgtccaggcactgtactaa

SEQ ID NO: 9716 - RNA, 21 nt, RNAi-sense strand
uguccaggcacuguacuaauu

SEQ ID NO: 9717 - RNA, 21 nt, RNAi-antisense strand
uuaguacagugccuggacauu

SEQ ID NO: 9718 - DNA, 21 bp, Homo sapiens
caggcactgtactaacctaca

SEQ ID NO: 9719 - RNA, 21 nt, RNAi-sense strand
ggcacuguacuaaccuacauu

SEQ ID NO: 9720 - RNA, 21 nt, RNAi-antisense strand
uguagguuaguacagugccuu

SEQ ID NO: 9721 - DNA, 21 bp, Homo sapiens
cactgtactaacctacagaga

SEQ ID NO: 9722 - RNA, 21 nt, RNAi-sense strand
cuguacuaaccuacagagauu

SEQ ID NO: 9723 - RNA, 21 nt, RNAi-antisense strand
ucucuguagguuaguacaguu

SEQ ID NO: 9724 - DNA, 21 bp, Homo sapiens
cattgctctgtaataatctca

SEQ ID NO: 9725 - RNA, 21 nt, RNAi-sense strand
uugcucuguaauaaucucauu

SEQ ID NO: 9726 - RNA, 21 nt, RNAi-antisense strand
ugagauuauuacagagcaauu

SEQ ID NO: 9727 - DNA, 21 bp, Homo sapiens
cacatatacagtagcttcctc

SEQ ID NO: 9728 - RNA, 21 nt, RNAi-sense strand
cauauacaguagcuuccucuu

SEQ ID NO: 9729 - RNA, 21 nt, RNAi-antisense strand
gaggaagcuacuguauauguu

SEQ ID NO: 9730 - DNA, 21 bp, Homo sapiens
cactgctgttatatttcatca

SEQ ID NO: 9731 - RNA, 21 nt, RNAi-sense strand
cugcuguuauauuucaucauu

SEQ ID NO: 9732 - RNA, 21 nt, RNAi-antisense strand
ugaugaaauauaacagcaguu

SEQ ID NO: 9733 - DNA, 21 bp, Homo sapiens
catcatgataattcagcaggc

SEQ ID NO: 9734 - RNA, 21 nt, RNAi-sense strand
ucaugauaauucagcaggcuu

SEQ ID NO: 9735 - RNA, 21 nt, RNAi-antisense strand
gccugcugaauuaucaugauu

SEQ ID NO: 9736 - DNA, 21 bp, Homo sapiens
catgataattcagcaggccag

SEQ ID NO: 9737 - RNA, 21 nt, RNAi-sense strand
ugauaauucagcaggccaguu

SEQ ID NO: 9738 - RNA, 21 nt, RNAi-antisense strand
cuggccugcugaauuaucauu

SEQ ID NO: 9739 - DNA, 21 bp, Homo sapiens
caggcttctagtttctcttag

SEQ ID NO: 9740 - RNA, 21 nt, RNAi-sense strand
ggcuucuaguuucucuuaguu

SEQ ID NO: 9741 - RNA, 21 nt, RNAi-antisense strand
cuaagagaaacuagaagccuu

SEQ ID NO: 9742 - DNA, 21 bp, Homo sapiens
cactattgatgagtcttagag

SEQ ID NO: 9743 - RNA, 21 nt, RNAi-sense strand
cuauugaugagucuuagaguu

SEQ ID NO: 9744 - RNA, 21 nt, RNAi-antisense strand
cucuaagacucaucaauaguu

SEQ ID NO: 9745 - DNA, 21 bp, Homo sapiens
cagacacaaagagacaaagct

SEQ ID NO: 9746 - RNA, 21 nt, RNAi-sense strand
gacacaaagagacaaagcuuu

SEQ ID NO: 9747 - RNA, 21 nt, RNAi-antisense strand
agcuuugucucuuugugucuu

SEQ ID NO: 9748 - DNA, 21 bp, Homo sapiens
cacaaagagacaaagctttga

SEQ ID NO: 9749 - RNA, 21 nt, RNAi-sense strand
caaagagacaaagcuuugauu

SEQ ID NO: 9750 - RNA, 21 nt, RNAi-antisense strand
ucaaagcuuugucucuuuguu

SEQ ID NO: 9751 - DNA, 21 bp, Homo sapiens
caaagagacaaagctttgaag

SEQ ID NO: 9752 - RNA, 21 nt, RNAi-sense strand
aagagacaaagcuuugaaguu

SEQ ID NO: 9753 - RNA, 21 nt, RNAi-antisense strand
cuucaaagcuuugucucuuuu

SEQ ID NO: 9754 - DNA, 21 bp, Homo sapiens
caggctactgcttcaatctca

SEQ ID NO: 9755 - RNA, 21 nt, RNAi-sense strand
ggcuacugcuucaaucucauu

SEQ ID NO: 9756 - RNA, 21 nt, RNAi-antisense strand
ugagauugaagcaguagccuu

SEQ ID NO: 9757 - DNA, 21 bp, Homo sapiens
caatctcaattgctttgtaag

SEQ ID NO: 9758 - RNA, 21 nt, RNAi-sense strand
aucucaauugcuuuguaaguu

SEQ ID NO: 9759 - RNA, 21 nt, RNAi-antisense strand
cuuacaaagcaauugagauuu

SEQ ID NO: 9760 - DNA, 21 bp, Homo sapiens
cagagacagacagactatggc

SEQ ID NO: 9761 - RNA, 21 nt, RNAi-sense strand
gagacagacagacuauggcuu

SEQ ID NO: 9762 - RNA, 21 nt, RNAi-antisense strand
gccauagucugucugucucuu

SEQ ID NO: 9763 - DNA, 21 bp, Homo sapiens
cagacagactatggccatggc

SEQ ID NO: 9764 - RNA, 21 nt, RNAi-sense strand
gacagacuauggccauggcuu

SEQ ID NO: 9765 - RNA, 21 nt, RNAi-antisense strand
gccauggccauagucugucuu

SEQ ID NO: 9766 - DNA, 21 bp, Homo sapiens
cagactatggccatggctcac

SEQ ID NO: 9767 - RNA, 21 nt, RNAi-sense strand
gacuauggccauggcucacuu

SEQ ID NO: 9768 - RNA, 21 nt, RNAi-antisense strand
gugagccauggccauagucuu

SEQ ID NO: 9769 - DNA, 21 bp, Homo sapiens
catggctcacatggtttacat

SEQ ID NO: 9770 - RNA, 21 nt, RNAi-sense strand
uggcucacaugguuuacauuu

SEQ ID NO: 9771 - RNA, 21 nt, RNAi-antisense strand
auguaaaccaugugagccauu

SEQ ID NO: 9772 - DNA, 21 bp, Homo sapiens
cacatggtttacatccttcac

SEQ ID NO: 9773 - RNA, 21 nt, RNAi-sense strand
caugguuuacauccuucacuu

SEQ ID NO: 9774 - RNA, 21 nt, RNAi-antisense strand
gugaaggauguaaaccauguu

SEQ ID NO: 9775 - DNA, 21 bp, Homo sapiens
catggtttacatccttcactg

SEQ ID NO: 9776 - RNA, 21 nt, RNAi-sense strand
ugguuuacauccuucacuguu

SEQ ID NO: 9777 - RNA, 21 nt, RNAi-antisense strand
cagugaaggauguaaaccauu

SEQ ID NO: 9778 - DNA, 21 bp, Homo sapiens
catccttcactgctcacgtgt

SEQ ID NO: 9779 - RNA, 21 nt, RNAi-sense strand
uccuucacugcucacguguuu

SEQ ID NO: 9780 - RNA, 21 nt, RNAi-antisense strand
acacgugagcagugaaggauu

SEQ ID NO: 9781 - DNA, 21 bp, Homo sapiens
cactgctcacgtgtttgctgt

SEQ ID NO: 9782 - RNA, 21 nt, RNAi-sense strand
cugcucacguguuugcuguuu

SEQ ID NO: 9783 - RNA, 21 nt, RNAi-antisense strand
acagcaaacacgugagcaguu

SEQ ID NO: 9784 - DNA, 21 bp, Homo sapiens
cacgtgtttgctgtcaagcca

SEQ ID NO: 9785 - RNA, 21 nt, RNAi-sense strand
cguguuugcugucaagccauu

SEQ ID NO: 9786 - RNA, 21 nt, RNAi-antisense strand
uggcuugacagcaaacacguu

SEQ ID NO: 9787 - DNA, 21 bp, Homo sapiens
cagtctgaaactaagatgtgc

SEQ ID NO: 9788 - RNA, 21 nt, RNAi-sense strand
gucugaaacuaagaugugcuu

SEQ ID NO: 9789 - RNA, 21 nt, RNAi-antisense strand
gcacaucuuaguuucagacuu

SEQ ID NO: 9790 - DNA, 21 bp, Homo sapiens
caaggtactatagcggatata

SEQ ID NO: 9791 - RNA, 21 nt, RNAi-sense strand
agguacuauagcggauauauu

SEQ ID NO: 9792 - RNA, 21 nt, RNAi-antisense strand
uauauccgcuauaguaccuuu

SEQ ID NO: 9793 - DNA, 21 bp, Homo sapiens
cagtagttctcaaagtgtggt

SEQ ID NO: 9794 - RNA, 21 nt, RNAi-sense strand
guaguucucaaagugugguuu

SEQ ID NO: 9795 - RNA, 21 nt, RNAi-antisense strand
accacacuuugagaacuacuu

SEQ ID NO: 9796 - DNA, 21 bp, Homo sapiens
caaagtgtggtctctggaaga

SEQ ID NO: 9797 - RNA, 21 nt, RNAi-sense strand
aaguguggucucuggaagauu

SEQ ID NO: 9798 - RNA, 21 nt, RNAi-antisense strand
ucuuccagagaccacacuuuu

SEQ ID NO: 9799 - DNA, 21 bp, Homo sapiens
cactccagacctacagaatca

SEQ ID NO: 9800 - RNA, 21 nt, RNAi-sense strand
cuccagaccuacagaaucauu

SEQ ID NO: 9801 - RNA, 21 nt, RNAi-antisense strand
ugauucuguaggucuggaguu

SEQ ID NO: 9802 - DNA, 21 bp, Homo sapiens
cagacctacagaatcagaaac

SEQ ID NO: 9803 - RNA, 21 nt, RNAi-sense strand
gaccuacagaaucagaaacuu

SEQ ID NO: 9804 - RNA, 21 nt, RNAi-antisense strand
guuucugauucuguaggucuu

SEQ ID NO: 9805 - DNA, 21 bp, Homo sapiens
caccacatgattctgatgtac

SEQ ID NO: 9806 - RNA, 21 nt, RNAi-sense strand
ccacaugauucugauguacuu

SEQ ID NO: 9807 - RNA, 21 nt, RNAi-antisense strand
guacaucagaaucaugugguu

SEQ ID NO: 9808 - DNA, 21 bp, Homo sapiens
cacatgattctgatgtactct

SEQ ID NO: 9809 - RNA, 21 nt, RNAi-sense strand
caugauucugauguacucuuu

SEQ ID NO: 9810 - RNA, 21 nt, RNAi-antisense strand
agaguacaucagaaucauguu

SEQ ID NO: 9811 - DNA, 21 bp, Homo sapiens
catgattctgatgtactctaa

SEQ ID NO: 9812 - RNA, 21 nt, RNAi-sense strand
ugauucugauguacucuaauu

SEQ ID NO: 9813 - RNA, 21 nt, RNAi-antisense strand
uuagaguacaucagaaucauu

SEQ ID NO: 9814 - DNA, 21 bp, Homo sapiens
caatccaagcacactccgcag

SEQ ID NO: 9815 - RNA, 21 nt, RNAi-sense strand
auccaagcacacuccgcaguu

SEQ ID NO: 9816 - RNA, 21 nt, RNAi-antisense strand
cugcggagugugcuuggauuu

SEQ ID NO: 9817 - DNA, 21 bp, Homo sapiens
caagcacactccgcaggcagt

SEQ ID NO: 9818 - RNA, 21 nt, RNAi-sense strand
agcacacuccgcaggcaguuu

SEQ ID NO: 9819 - RNA, 21 nt, RNAi-antisense strand
acugccugcggagugugcuuu

SEQ ID NO: 9820 - DNA, 21 bp, Homo sapiens
cacactccgcaggcagttacc

SEQ ID NO: 9821 - RNA, 21 nt, RNAi-sense strand
cacuccgcaggcaguuaccuu

SEQ ID NO: 9822 - RNA, 21 nt, RNAi-antisense strand
gguaacugccugcggaguguu

SEQ ID NO: 9823 - DNA, 21 bp, Homo sapiens
cactccgcaggcagttaccag

SEQ ID NO: 9824 - RNA, 21 nt, RNAi-sense strand
cuccgcaggcaguuaccaguu

SEQ ID NO: 9825 - RNA, 21 nt, RNAi-antisense strand
cugguaacugccugcggaguu

SEQ ID NO: 9826 - DNA, 21 bp, Homo sapiens
caggcagttaccagtacggct

SEQ ID NO: 9827 - RNA, 21 nt, RNAi-sense strand
ggcaguuaccaguacggcuuu

SEQ ID NO: 9828 - RNA, 21 nt, RNAi-antisense strand
agccguacugguaacugccuu

SEQ ID NO: 9829 - DNA, 21 bp, Homo sapiens
cagttaccagtacggctggct

SEQ ID NO: 9830 - RNA, 21 nt, RNAi-sense strand
guuaccaguacggcuggcuuu

SEQ ID NO: 9831 - RNA, 21 nt, RNAi-antisense strand
agccagccguacugguaacuu

SEQ ID NO: 9832 - DNA, 21 bp, Homo sapiens
cagtacggctggctacaactg

SEQ ID NO: 9833 - RNA, 21 nt, RNAi-sense strand
guacggcuggcuacaacuguu

SEQ ID NO: 9834 - RNA, 21 nt, RNAi-antisense strand
caguuguagccagccguacuu

SEQ ID NO: 9835 - DNA, 21 bp, Homo sapiens
caactgctccatccgtgcctc

SEQ ID NO: 9836 - RNA, 21 nt, RNAi-sense strand
acugcuccauccgugccucuu

SEQ ID NO: 9837 - RNA, 21 nt, RNAi-antisense strand
gaggcacggauggagcaguuu

SEQ ID NO: 9838 - DNA, 21 bp, Homo sapiens
caaactcacaggtgactctaa

SEQ ID NO: 9839 - RNA, 21 nt, RNAi-sense strand
aacucacaggugacucuaauu

SEQ ID NO: 9840 - RNA, 21 nt, RNAi-antisense strand
uuagagucaccugugaguuuu

SEQ ID NO: 9841 - DNA, 21 bp, Homo sapiens
cacaggtgactctaaggttat

SEQ ID NO: 9842 - RNA, 21 nt, RNAi-sense strand
caggugacucuaagguuauuu

SEQ ID NO: 9843 - RNA, 21 nt, RNAi-antisense strand
auaaccuuagagucaccuguu

SEQ ID NO: 9844 - DNA, 21 bp, Homo sapiens
caggtgactctaaggttatct

SEQ ID NO: 9845 - RNA, 21 nt, RNAi-sense strand
ggugacucuaagguuaucuuu

SEQ ID NO: 9846 - RNA, 21 nt, RNAi-antisense strand
agauaaccuuagagucaccuu

SEQ ID NO: 9847 - DNA, 21 bp, Homo sapiens
caaaccactggcctccactca

SEQ ID NO: 9848 - RNA, 21 nt, RNAi-sense strand
aaccacuggccuccacucauu

SEQ ID NO: 9849 - RNA, 21 nt, RNAi-antisense strand
ugaguggaggccagugguuuu

SEQ ID NO: 9850 - DNA, 21 bp, Homo sapiens
cactcaggcctccatcttctc

SEQ ID NO: 9851 - RNA, 21 nt, RNAi-sense strand
cucaggccuccaucuucucuu

SEQ ID NO: 9852 - RNA, 21 nt, RNAi-antisense strand
gagaagauggaggccugaguu

SEQ ID NO: 9853 - DNA, 21 bp, Homo sapiens
caggcctccatcttctcatgc

SEQ ID NO: 9854 - RNA, 21 nt, RNAi-sense strand
ggccuccaucuucucaugcuu

SEQ ID NO: 9855 - RNA, 21 nt, RNAi-antisense strand
gcaugagaagauggaggccuu

SEQ ID NO: 9856 - DNA, 21 bp, Homo sapiens
cagtatttaacttctgaggaa

SEQ ID NO: 9857 - RNA, 21 nt, RNAi-sense strand
guauuuaacuucugaggaauu

SEQ ID NO: 9858 - RNA, 21 nt, RNAi-antisense strand
uuccucagaaguuaaauacuu

SEQ ID NO: 9859 - DNA, 21 bp, Homo sapiens
caatgaagccatatgaaccag

SEQ ID NO: 9860 - RNA, 21 nt, RNAi-sense strand
augaagccauaugaaccaguu

SEQ ID NO: 9861 - RNA, 21 nt, RNAi-antisense strand
cugguucauauggcuucauuu

SEQ ID NO: 9862 - DNA, 21 bp, Homo sapiens
catatgaaccagctgtcagtt

SEQ ID NO: 9863 - RNA, 21 nt, RNAi-sense strand
uaugaaccagcugucaguuuu

SEQ ID NO: 9864 - RNA, 21 nt, RNAi-antisense strand
aacugacagcugguucauauu

SEQ ID NO: 9865 - DNA, 21 bp, Homo sapiens
cagctgtcagttgcacttcta

SEQ ID NO: 9866 - RNA, 21 nt, RNAi-sense strand
gcugucaguugcacuucuauu

SEQ ID NO: 9867 - RNA, 21 nt, RNAi-antisense strand
uagaagugcaacugacagcuu

SEQ ID NO: 9868 - DNA, 21 bp, Homo sapiens
cagttgcacttctaagacttt

SEQ ID NO: 9869 - RNA, 21 nt, RNAi-sense strand
guugcacuucuaagacuuuuu

SEQ ID NO: 9870 - RNA, 21 nt, RNAi-antisense strand
aaagucuuagaagugcaacuu

SEQ ID NO: 9871 - DNA, 21 bp, Homo sapiens
cacttctaagactttacttag

SEQ ID NO: 9872 - RNA, 21 nt, RNAi-sense strand
cuucuaagacuuuacuuaguu

SEQ ID NO: 9873 - RNA, 21 nt, RNAi-antisense strand
cuaaguaaagucuuagaaguu

SEQ ID NO: 9874 - DNA, 21 bp, Homo sapiens
cagtaaattatagctcatgtg

SEQ ID NO: 9875 - RNA, 21 nt, RNAi-sense strand
guaaauuauagcucauguguu

SEQ ID NO: 9876 - RNA, 21 nt, RNAi-antisense strand
cacaugagcuauaauuuacuu

SEQ ID NO: 9877 - DNA, 21 bp, Homo sapiens
catgtgcattatttcagatac

SEQ ID NO: 9878 - RNA, 21 nt, RNAi-sense strand
ugugcauuauuucagauacuu

SEQ ID NO: 9879 - RNA, 21 nt, RNAi-antisense strand
guaucugaaauaaugcacauu

SEQ ID NO: 9880 - DNA, 21 bp, Homo sapiens
cagatacttagcttatgagta

SEQ ID NO: 9881 - RNA, 21 nt, RNAi-sense strand
gauacuuagcuuaugaguauu

SEQ ID NO: 9882 - RNA, 21 nt, RNAi-antisense strand
uacucauaagcuaaguaucuu

SEQ ID NO: 9883 - DNA, 21 bp, Homo sapiens
cacttgattcacagcgtgcat

SEQ ID NO: 9884 - RNA, 21 nt, RNAi-sense strand
cuugauucacagcgugcauuu

SEQ ID NO: 9885 - RNA, 21 nt, RNAi-antisense strand
augcacgcugugaaucaaguu

SEQ ID NO: 9886 - DNA, 21 bp, Homo sapiens
cacagcgtgcatacacagatt

SEQ ID NO: 9887 - RNA, 21 nt, RNAi-sense strand
cagcgugcauacacagauuuu

SEQ ID NO: 9888 - RNA, 21 nt, RNAi-antisense strand
aaucuguguaugcacgcuguu

SEQ ID NO: 9889 - DNA, 21 bp, Homo sapiens
cagcgtgcatacacagattgt

SEQ ID NO: 9890 - RNA, 21 nt, RNAi-sense strand
gcgugcauacacagauuguuu

SEQ ID NO: 9891 - RNA, 21 nt, RNAi-antisense strand
acaaucuguguaugcacgcuu

SEQ ID NO: 9892 - DNA, 21 bp, Homo sapiens
catacacagattgtgagaagt

SEQ ID NO: 9893 - RNA, 21 nt, RNAi-sense strand
uacacagauugugagaaguuu

SEQ ID NO: 9894 - RNA, 21 nt, RNAi-antisense strand
acuucucacaaucuguguauu

SEQ ID NO: 9895 - DNA, 21 bp, Homo sapiens
cacagattgtgagaagtcttc

SEQ ID NO: 9896 - RNA, 21 nt, RNAi-sense strand
cagauugugagaagucuucuu

SEQ ID NO: 9897 - RNA, 21 nt, RNAi-antisense strand
gaagacuucucacaaucuguu

SEQ ID NO: 9898 - DNA, 21 bp, Homo sapiens
cagattgtgagaagtcttcag

SEQ ID NO: 9899 - RNA, 21 nt, RNAi-sense strand
gauugugagaagucuucaguu

SEQ ID NO: 9900 - RNA, 21 nt, RNAi-antisense strand
cugaagacuucucacaaucuu

SEQ ID NO: 9901 - DNA, 21 bp, Homo sapiens
catttgaacttgatggctaac

SEQ ID NO: 9902 - RNA, 21 nt, RNAi-sense strand
uuugaacuugauggcuaacuu

SEQ ID NO: 9903 - RNA, 21 nt, RNAi-antisense strand
guuagccaucaaguucaaauu

SEQ ID NO: 9904 - DNA, 21 bp, Homo sapiens
caaatgtaacttactgcgact

SEQ ID NO: 9905 - RNA, 21 nt, RNAi-sense strand
aauguaacuuacugcgacuuu

SEQ ID NO: 9906 - RNA, 21 nt, RNAi-antisense strand
agucgcaguaaguuacauuuu

SEQ ID NO: 9907 - DNA, 21 bp, Homo sapiens
gacaaaggccagtgcttctgt

SEQ ID NO: 9908 - RNA, 21 nt, RNAi-sense strand
caaaggccagugcuucuguuu

SEQ ID NO: 9909 - RNA, 21 nt, RNAi-antisense strand
acagaagcacuggccuuuguu

SEQ ID NO: 9910 - DNA, 21 bp, Homo sapiens
gaaaggattcacaggtcctga

SEQ ID NO: 9911 - RNA, 21 nt, RNAi-sense strand
aaggauucacagguccugauu

SEQ ID NO: 9912 - RNA, 21 nt, RNAi-antisense strand
ucaggaccugugaauccuuuu

SEQ ID NO: 9913 - DNA, 21 bp, Homo sapiens
gattcacaggtcctgaaggct

SEQ ID NO: 9914 - RNA, 21 nt, RNAi-sense strand
uucacagguccugaaggcuuu

SEQ ID NO: 9915 - RNA, 21 nt, RNAi-antisense strand
agccuucaggaccugugaauu

SEQ ID NO: 9916 - DNA, 21 bp, Homo sapiens
gaataagtggattgccaggat

SEQ ID NO: 9917 - RNA, 21 nt, RNAi-sense strand
auaaguggauugccaggauuu

SEQ ID NO: 9918 - RNA, 21 nt, RNAi-antisense strand
auccuggcaauccacuuauuu

SEQ ID NO: 9919 - DNA, 21 bp, Homo sapiens
gacttgtcggtgtaccaggat

SEQ ID NO: 9920 - RNA, 21 nt, RNAi-sense strand
cuugucgguguaccaggauuu

SEQ ID NO: 9921 - RNA, 21 nt, RNAi-antisense strand
auccugguacaccgacaaguu

SEQ ID NO: 9922 - DNA, 21 bp, Homo sapiens
gagaagatatagaacttgatg

SEQ ID NO: 9923 - RNA, 21 nt, RNAi-sense strand
gaagauauagaacuugauguu

SEQ ID NO: 9924 - RNA, 21 nt, RNAi-antisense strand
caucaaguucuauaucuucuu

SEQ ID NO: 9925 - DNA, 21 bp, Homo sapiens
gaagatatagaacttgatgca

SEQ ID NO: 9926 - RNA, 21 nt, RNAi-sense strand
agauauagaacuugaugcauu

SEQ ID NO: 9927 - RNA, 21 nt, RNAi-antisense strand
ugcaucaaguucuauaucuuu

SEQ ID NO: 9928 - DNA, 21 bp, Homo sapiens
gattctttggctttccaggag

SEQ ID NO: 9929 - RNA, 21 nt, RNAi-sense strand
uucuuuggcuuuccaggaguu

SEQ ID NO: 9930 - RNA, 21 nt, RNAi-antisense strand
cuccuggaaagccaaagaauu

SEQ ID NO: 9931 - DNA, 21 bp, Homo sapiens
gaaagagtgataggacataaa

SEQ ID NO: 9932 - RNA, 21 nt, RNAi-sense strand
aagagugauaggacauaaauu

SEQ ID NO: 9933 - RNA, 21 nt, RNAi-antisense strand
uuuauguccuaucacucuuuu

SEQ ID NO: 9934 - DNA, 21 bp, Homo sapiens
gagtgataggacataaaggag

SEQ ID NO: 9935 - RNA, 21 nt, RNAi-sense strand
gugauaggacauaaaggaguu

SEQ ID NO: 9936 - RNA, 21 nt, RNAi-antisense strand
cuccuuuauguccuaucacuu

SEQ ID NO: 9937 - DNA, 21 bp, Homo sapiens
gataggacataaaggagagcg

SEQ ID NO: 9938 - RNA, 21 nt, RNAi-sense strand
uaggacauaaaggagagcguu

SEQ ID NO: 9939 - RNA, 21 nt, RNAi-antisense strand
cgcucuccuuuauguccuauu

SEQ ID NO: 9940 - DNA, 21 bp, Homo sapiens
gaccaccaggaacagttattg

SEQ ID NO: 9941 - RNA, 21 nt, RNAi-sense strand
ccaccaggaacaguuauuguu

SEQ ID NO: 9942 - RNA, 21 nt, RNAi-antisense strand
caauaacuguuccuggugguu

SEQ ID NO: 9943 - DNA, 21 bp, Homo sapiens
gataacagaacggacctcaag

SEQ ID NO: 9944 - RNA, 21 nt, RNAi-sense strand
uaacagaacggaccucaaguu

SEQ ID NO: 9945 - RNA, 21 nt, RNAi-antisense strand
cuugagguccguucuguuauu

SEQ ID NO: 9946 - DNA, 21 bp, Homo sapiens
gactgcctggagaatcatatg

SEQ ID NO: 9947 - RNA, 21 nt, RNAi-sense strand
cugccuggagaaucauauguu

SEQ ID NO: 9948 - RNA, 21 nt, RNAi-antisense strand
cauaugauucuccaggcaguu

SEQ ID NO: 9949 - DNA, 21 bp, Homo sapiens
gagaatcatatggatctgaaa

SEQ ID NO: 9950 - RNA, 21 nt, RNAi-sense strand
gaaucauauggaucugaaauu

SEQ ID NO: 9951 - RNA, 21 nt, RNAi-antisense strand
uuucagauccauaugauucuu

SEQ ID NO: 9952 - DNA, 21 bp, Homo sapiens
gatttcgtggtccaacagaat

SEQ ID NO: 9953 - RNA, 21 nt, RNAi-sense strand
uuucgugguccaacagaauuu

SEQ ID NO: 9954 - RNA, 21 nt, RNAi-antisense strand
auucuguuggaccacgaaauu

SEQ ID NO: 9955 - DNA, 21 bp, Homo sapiens
gaatattatgacacataccag

SEQ ID NO: 9956 - RNA, 21 nt, RNAi-sense strand
auauuaugacacauaccaguu

SEQ ID NO: 9957 - RNA, 21 nt, RNAi-antisense strand
cugguaugugucauaauauuu

SEQ ID NO: 9958 - DNA, 21 bp, Homo sapiens
gagatgaaggcactccaggcc

SEQ ID NO: 9959 - RNA, 21 nt, RNAi-sense strand
gaugaaggcacuccaggccuu

SEQ ID NO: 9960 - RNA, 21 nt, RNAi-antisense strand
ggccuggagugccuucaucuu

SEQ ID NO: 9961 - DNA, 21 bp, Homo sapiens
gagttcctggaagtcctggat

SEQ ID NO: 9962 - RNA, 21 nt, RNAi-sense strand
guuccuggaaguccuggauuu

SEQ ID NO: 9963 - RNA, 21 nt, RNAi-antisense strand
auccaggacuuccaggaacuu

SEQ ID NO: 9964 - DNA, 21 bp, Homo sapiens
gaagtcctggatcatcaaggc

SEQ ID NO: 9965 - RNA, 21 nt, RNAi-sense strand
aguccuggaucaucaaggcuu

SEQ ID NO: 9966 - RNA, 21 nt, RNAi-antisense strand
gccuugaugauccaggacuuu

SEQ ID NO: 9967 - DNA, 21 bp, Homo sapiens
gatcatcaaggcctggcctca

SEQ ID NO: 9968 - RNA, 21 nt, RNAi-sense strand
ucaucaaggccuggccucauu

SEQ ID NO: 9969 - RNA, 21 nt, RNAi-antisense strand
ugaggccaggccuugaugauu

SEQ ID NO: 9970 - DNA, 21 bp, Homo sapiens
gatggccaggcttgaaaggaa

SEQ ID NO: 9971 - RNA, 21 nt, RNAi-sense strand
uggccaggcuugaaaggaauu

SEQ ID NO: 9972 - RNA, 21 nt, RNAi-antisense strand
uuccuuucaagccuggccauu

SEQ ID NO: 9973 - DNA, 21 bp, Homo sapiens
gaccgccaggtgacatcgttt

SEQ ID NO: 9974 - RNA, 21 nt, RNAi-sense strand
ccgccaggugacaucguuuuu

SEQ ID NO: 9975 - RNA, 21 nt, RNAi-antisense strand
aaacgaugucaccuggcgguu

SEQ ID NO: 9976 - DNA, 21 bp, Homo sapiens
gagatcacggactgccaggct

SEQ ID NO: 9977 - RNA, 21 nt, RNAi-sense strand
gaucacggacugccaggcuuu

SEQ ID NO: 9978 - RNA, 21 nt, RNAi-antisense strand
agccuggcaguccgugaucuu

SEQ ID NO: 9979 - DNA, 21 bp, Homo sapiens
gatcacggactgccaggctat

SEQ ID NO: 9980 - RNA, 21 nt, RNAi-sense strand
ucacggacugccaggcuauuu

SEQ ID NO: 9981 - RNA, 21 nt, RNAi-antisense strand
auagccuggcaguccgugauu

SEQ ID NO: 9982 - DNA, 21 bp, Homo sapiens
gagaaccaggcctcctgtgta

SEQ ID NO: 9983 - RNA, 21 nt, RNAi-sense strand
gaaccaggccuccuguguauu

SEQ ID NO: 9984 - RNA, 21 nt, RNAi-antisense strand
uacacaggaggccugguucuu

SEQ ID NO: 9985 - DNA, 21 bp, Homo sapiens
gaaccaggcctcctgtgtaca

SEQ ID NO: 9986 - RNA, 21 nt, RNAi-sense strand
accaggccuccuguguacauu

SEQ ID NO: 9987 - RNA, 21 nt, RNAi-antisense strand
uguacacaggaggccugguuu

SEQ ID NO: 9988 - DNA, 21 bp, Homo sapiens
gaagacaaggcgcagctggct

SEQ ID NO: 9989 - RNA, 21 nt, RNAi-sense strand
agacaaggcgcagcuggcuuu

SEQ ID NO: 9990 - RNA, 21 nt, RNAi-antisense strand
agccagcugcgccuugucuuu

SEQ ID NO: 9991 - DNA, 21 bp, Homo sapiens
gacaaggcgcagctggcttga

SEQ ID NO: 9992 - RNA, 21 nt, RNAi-sense strand
caaggcgcagcuggcuugauu

SEQ ID NO: 9993 - RNA, 21 nt, RNAi-antisense strand
ucaagccagcugcgccuuguu

SEQ ID NO: 9994 - DNA, 21 bp, Homo sapiens
gaaatacaggtcttccaggat

SEQ ID NO: 9995 - RNA, 21 nt, RNAi-sense strand
aauacaggucuuccaggauuu

SEQ ID NO: 9996 - RNA, 21 nt, RNAi-antisense strand
auccuggaagaccuguauuuu

SEQ ID NO: 9997 - DNA, 21 bp, Homo sapiens
gatggaattcctggaactctg

SEQ ID NO: 9998 - RNA, 21 nt, RNAi-sense strand
uggaauuccuggaacucuguu

SEQ ID NO: 9999 - RNA, 21 nt, RNAi-antisense strand
cagaguuccaggaauuccauu

SEQ ID NO: 10000 - DNA, 21 bp, Homo sapiens
gagtgaaaggattaccaggac

SEQ ID NO: 10001 - RNA, 21 nt, RNAi-sense strand
gugaaaggauuaccaggacuu

SEQ ID NO: 10002 - RNA, 21 nt, RNAi-antisense strand
guccugguaauccuuucacuu

SEQ ID NO: 10003 - DNA, 21 bp, Homo sapiens
gaaaggattaccaggacctaa

SEQ ID NO: 10004 - RNA, 21 nt, RNAi-sense strand
aaggauuaccaggaccuaauu

SEQ ID NO: 10005 - RNA, 21 nt, RNAi-antisense strand
uuagguccugguaauccuuuu

SEQ ID NO: 10006 - DNA, 21 bp, Homo sapiens
gattaccaggacctaaaggcg

SEQ ID NO: 10007 - RNA, 21 nt, RNAi-sense strand
uuaccaggaccuaaaggcguu

SEQ ID NO: 10008 - RNA, 21 nt, RNAi-antisense strand
cgccuuuagguccugguaauu

SEQ ID NO: 10009 - DNA, 21 bp, Homo sapiens
gacctaaaggcgaactggctc

SEQ ID NO: 10010 - RNA, 21 nt, RNAi-sense strand
ccuaaaggcgaacuggcucuu

SEQ ID NO: 10011 - RNA, 21 nt, RNAi-antisense strand
gagccaguucgccuuuagguu

SEQ ID NO: 10012 - DNA, 21 bp, Homo sapiens
gaactggctctgagtggtgag

SEQ ID NO: 10013 - RNA, 21 nt, RNAi-sense strand
acuggcucugaguggugaguu

SEQ ID NO: 10014 - RNA, 21 nt, RNAi-antisense strand
cucaccacucagagccaguuu

SEQ ID NO: 10015 - DNA, 21 bp, Homo sapiens
gagagctcagtgtttcaacac

SEQ ID NO: 10016 - RNA, 21 nt, RNAi-sense strand
gagcucaguguuucaacacuu

SEQ ID NO: 10017 - RNA, 21 nt, RNAi-antisense strand
guguugaaacacugagcucuu

SEQ ID NO: 10018 - DNA, 21 bp, Homo sapiens
gagctcagtgtttcaacacca

SEQ ID NO: 10019 - RNA, 21 nt, RNAi-sense strand
gcucaguguuucaacaccauu

SEQ ID NO: 10020 - RNA, 21 nt, RNAi-antisense strand
ugguguugaaacacugagcuu

SEQ ID NO: 10021 - DNA, 21 bp, Homo sapiens
gaaatgtggagatcctggtct

SEQ ID NO: 10022 - RNA, 21 nt, RNAi-sense strand
aauguggagauccuggucuuu

SEQ ID NO: 10023 - RNA, 21 nt, RNAi-antisense strand
agaccaggaucuccacauuuu

SEQ ID NO: 10024 - DNA, 21 bp, Homo sapiens
gatggtgaaccaggaattcca

SEQ ID NO: 10025 - RNA, 21 nt, RNAi-sense strand
uggugaaccaggaauuccauu

SEQ ID NO: 10026 - RNA, 21 nt, RNAi-antisense strand
uggaauuccugguucaccauu

SEQ ID NO: 10027 - DNA, 21 bp, Homo sapiens
gaaccaggaattccaggaatt

SEQ ID NO: 10028 - RNA, 21 nt, RNAi-sense strand
accaggaauuccaggaauuuu

SEQ ID NO: 10029 - RNA, 21 nt, RNAi-antisense strand
aauuccuggaauuccugguuu

SEQ ID NO: 10030 - DNA, 21 bp, Homo sapiens
gaattccaggaattggatttc

SEQ ID NO: 10031 - RNA, 21 nt, RNAi-sense strand
auuccaggaauuggauuucuu

SEQ ID NO: 10032 - RNA, 21 nt, RNAi-antisense strand
gaaauccaauuccuggaauuu

SEQ ID NO: 10033 - DNA, 21 bp, Homo sapiens
gagaaccagcagtagccatgc

SEQ ID NO: 10034 - RNA, 21 nt, RNAi-sense strand
gaaccagcaguagccaugcuu

SEQ ID NO: 10035 - RNA, 21 nt, RNAi-antisense strand
gcauggcuacugcugguucuu

SEQ ID NO: 10036 - DNA, 21 bp, Homo sapiens
gaaccagcagtagccatgcct

SEQ ID NO: 10037 - RNA, 21 nt, RNAi-sense strand
accagcaguagccaugccuuu

SEQ ID NO: 10038 - RNA, 21 nt, RNAi-antisense strand
aggcauggcuacugcugguuu

SEQ ID NO: 10039 - DNA, 21 bp, Homo sapiens
gaggaccaggaacaccaggtt

SEQ ID NO: 10040 - RNA, 21 nt, RNAi-sense strand
ggaccaggaacaccagguuuu

SEQ ID NO: 10041 - RNA, 21 nt, RNAi-antisense strand
aaccugguguuccugguccuu

SEQ ID NO: 10042 - DNA, 21 bp, Homo sapiens
gaacatggagaaattggactc

SEQ ID NO: 10043 - RNA, 21 nt, RNAi-sense strand
acauggagaaauuggacucuu

SEQ ID NO: 10044 - RNA, 21 nt, RNAi-antisense strand
gaguccaauuucuccauguuu

SEQ ID NO: 10045 - DNA, 21 bp, Homo sapiens
gatggaccacgaggagatcca

SEQ ID NO: 10046 - RNA, 21 nt, RNAi-sense strand
uggaccacgaggagauccauu

SEQ ID NO: 10047 - RNA, 21 nt, RNAi-antisense strand
uggaucuccucgugguccauu

SEQ ID NO: 10048 - DNA, 21 bp, Homo sapiens
gaccacctggagaacaaggac

SEQ ID NO: 10049 - RNA, 21 nt, RNAi-sense strand
ccaccuggagaacaaggacuu

SEQ ID NO: 10050 - RNA, 21 nt, RNAi-antisense strand
guccuuguucuccaggugguu

SEQ ID NO: 10051 - DNA, 21 bp, Homo sapiens
gacttccaggcttaaatggat

SEQ ID NO: 10052 - RNA, 21 nt, RNAi-sense strand
cuuccaggcuuaaauggauuu

SEQ ID NO: 10053 - RNA, 21 nt, RNAi-antisense strand
auccauuuaagccuggaaguu

SEQ ID NO: 10054 - DNA, 21 bp, Homo sapiens
gaattccaggcttggatagat

SEQ ID NO: 10055 - RNA, 21 nt, RNAi-sense strand
auuccaggcuuggauagauuu

SEQ ID NO: 10056 - RNA, 21 nt, RNAi-antisense strand
aucuauccaagccuggaauuu

SEQ ID NO: 10057 - DNA, 21 bp, Homo sapiens
gatagatcaggatttcctgga

SEQ ID NO: 10058 - RNA, 21 nt, RNAi-sense strand
uagaucaggauuuccuggauu

SEQ ID NO: 10059 - RNA, 21 nt, RNAi-antisense strand
uccaggaaauccugaucuauu

SEQ ID NO: 10060 - DNA, 21 bp, Homo sapiens
gatcaggatttcctggagaaa

SEQ ID NO: 10061 - RNA, 21 nt, RNAi-sense strand
ucaggauuuccuggagaaauu

SEQ ID NO: 10062 - RNA, 21 nt, RNAi-antisense strand
uuucuccaggaaauccugauu

SEQ ID NO: 10063 - DNA, 21 bp, Homo sapiens
gatttcctggagaaactggat

SEQ ID NO: 10064 - RNA, 21 nt, RNAi-sense strand
uuuccuggagaaacuggauuu

SEQ ID NO: 10065 - RNA, 21 nt, RNAi-antisense strand
auccaguuucuccaggaaauu

SEQ ID NO: 10066 - DNA, 21 bp, Homo sapiens
gagaaactggatcaccaggaa

SEQ ID NO: 10067 - RNA, 21 nt, RNAi-sense strand
gaaacuggaucaccaggaauu

SEQ ID NO: 10068 - RNA, 21 nt, RNAi-antisense strand
uuccuggugauccaguuucuu

SEQ ID NO: 10069 - DNA, 21 bp, Homo sapiens
gaaactggatcaccaggaatt

SEQ ID NO: 10070 - RNA, 21 nt, RNAi-sense strand
aacuggaucaccaggaauuuu

SEQ ID NO: 10071 - RNA, 21 nt, RNAi-antisense strand
aauuccuggugauccaguuuu

SEQ ID NO: 10072 - DNA, 21 bp, Homo sapiens
gatcaccaggaattccaggtc

SEQ ID NO: 10073 - RNA, 21 nt, RNAi-sense strand
ucaccaggaauuccaggucuu

SEQ ID NO: 10074 - RNA, 21 nt, RNAi-antisense strand
gaccuggaauuccuggugauu

SEQ ID NO: 10075 - DNA, 21 bp, Homo sapiens
gaattccaggtcatcaaggtg

SEQ ID NO: 10076 - RNA, 21 nt, RNAi-sense strand
auuccaggucaucaagguguu

SEQ ID NO: 10077 - RNA, 21 nt, RNAi-antisense strand
caccuugaugaccuggaauuu

SEQ ID NO: 10078 - DNA, 21 bp, Homo sapiens
gaggatatccaggaaatccgg

SEQ ID NO: 10079 - RNA, 21 nt, RNAi-sense strand
ggauauccaggaaauccgguu

SEQ ID NO: 10080 - RNA, 21 nt, RNAi-antisense strand
ccggauuuccuggauauccuu

SEQ ID NO: 10081 - DNA, 21 bp, Homo sapiens
gatttcctggagccattggcc

SEQ ID NO: 10082 - RNA, 21 nt, RNAi-sense strand
uuuccuggagccauuggccuu

SEQ ID NO: 10083 - RNA, 21 nt, RNAi-antisense strand
ggccaauggcuccaggaaauu

SEQ ID NO: 10084 - DNA, 21 bp, Homo sapiens
gaacaaggagataaaggaaat

SEQ ID NO: 10085 - RNA, 21 nt, RNAi-sense strand
acaaggagauaaaggaaauuu

SEQ ID NO: 10086 - RNA, 21 nt, RNAi-antisense strand
auuuccuuuaucuccuuguuu

SEQ ID NO: 10087 - DNA, 21 bp, Homo sapiens
gacaaaggagaaccaggtctc

SEQ ID NO: 10088 - RNA, 21 nt, RNAi-sense strand
caaaggagaaccaggucucuu

SEQ ID NO: 10089 - RNA, 21 nt, RNAi-antisense strand
gagaccugguucuccuuuguu

SEQ ID NO: 10090 - DNA, 21 bp, Homo sapiens
gagaaccaggtctcaaaggat

SEQ ID NO: 10091 - RNA, 21 nt, RNAi-sense strand
gaaccaggucucaaaggauuu

SEQ ID NO: 10092 - RNA, 21 nt, RNAi-antisense strand
auccuuugagaccugguucuu

SEQ ID NO: 10093 - DNA, 21 bp, Homo sapiens
gaaccaggtctcaaaggattc

SEQ ID NO: 10094 - RNA, 21 nt, RNAi-sense strand
accaggucucaaaggauucuu

SEQ ID NO: 10095 - RNA, 21 nt, RNAi-antisense strand
gaauccuuugagaccugguuu

SEQ ID NO: 10096 - DNA, 21 bp, Homo sapiens
gattcgcaggaaatccaggtg

SEQ ID NO: 10097 - RNA, 21 nt, RNAi-sense strand
uucgcaggaaauccagguguu

SEQ ID NO: 10098 - RNA, 21 nt, RNAi-antisense strand
caccuggauuuccugcgaauu

SEQ ID NO: 10099 - DNA, 21 bp, Homo sapiens
gaaatccaggtgagaaaggaa

SEQ ID NO: 10100 - RNA, 21 nt, RNAi-sense strand
aauccaggugagaaaggaauu

SEQ ID NO: 10101 - RNA, 21 nt, RNAi-antisense strand
uuccuuucucaccuggauuuu

SEQ ID NO: 10102 - DNA, 21 bp, Homo sapiens
gagaaaggaaacagaggcgtt

SEQ ID NO: 10103 - RNA, 21 nt, RNAi-sense strand
gaaaggaaacagaggcguuuu

SEQ ID NO: 10104 - RNA, 21 nt, RNAi-antisense strand
aacgccucuguuuccuuucuu

SEQ ID NO: 10105 - DNA, 21 bp, Homo sapiens
gaaaggaaacagaggcgttcc

SEQ ID NO: 10106 - RNA, 21 nt, RNAi-sense strand
aaggaaacagaggcguuccuu

SEQ ID NO: 10107 - RNA, 21 nt, RNAi-antisense strand
ggaacgccucuguuuccuuuu

SEQ ID NO: 10108 - DNA, 21 bp, Homo sapiens
gaatcctggagaaccaggact

SEQ ID NO: 10109 - RNA, 21 nt, RNAi-sense strand
auccuggagaaccaggacuuu

SEQ ID NO: 10110 - RNA, 21 nt, RNAi-antisense strand
aguccugguucuccaggauuu

SEQ ID NO: 10111 - DNA, 21 bp, Homo sapiens
gagaaccaggactccgtggta

SEQ ID NO: 10112 - RNA, 21 nt, RNAi-sense strand
gaaccaggacuccgugguauu

SEQ ID NO: 10113 - RNA, 21 nt, RNAi-antisense strand
uaccacggaguccugguucuu

SEQ ID NO: 10114 - DNA, 21 bp, Homo sapiens
gaaccaggactccgtggtata

SEQ ID NO: 10115 - RNA, 21 nt, RNAi-sense strand
accaggacuccgugguauauu

SEQ ID NO: 10116 - RNA, 21 nt, RNAi-antisense strand
uauaccacggaguccugguuu

SEQ ID NO: 10117 - DNA, 21 bp, Homo sapiens
gactccgtggtataccaggaa

SEQ ID NO: 10118 - RNA, 21 nt, RNAi-sense strand
cuccgugguauaccaggaauu

SEQ ID NO: 10119 - RNA, 21 nt, RNAi-antisense strand
uuccugguauaccacggaguu

SEQ ID NO: 10120 - DNA, 21 bp, Homo sapiens
gagagccaggttattcagaag

SEQ ID NO: 10121 - RNA, 21 nt, RNAi-sense strand
gagccagguuauucagaaguu

SEQ ID NO: 10122 - RNA, 21 nt, RNAi-antisense strand
cuucugaauaaccuggcucuu

SEQ ID NO: 10123 - DNA, 21 bp, Homo sapiens
gagccaggttattcagaaggt

SEQ ID NO: 10124 - RNA, 21 nt, RNAi-sense strand
gccagguuauucagaagguuu

SEQ ID NO: 10125 - RNA, 21 nt, RNAi-antisense strand
accuucugaauaaccuggcuu

SEQ ID NO: 10126 - DNA, 21 bp, Homo sapiens
gaaggtacaaggccaggacca

SEQ ID NO: 10127 - RNA, 21 nt, RNAi-sense strand
agguacaaggccaggaccauu

SEQ ID NO: 10128 - RNA, 21 nt, RNAi-antisense strand
ugguccuggccuuguaccuuu

SEQ ID NO: 10129 - DNA, 21 bp, Homo sapiens
gaagtcctggaagtcctggcc

SEQ ID NO: 10130 - RNA, 21 nt, RNAi-sense strand
aguccuggaaguccuggccuu

SEQ ID NO: 10131 - RNA, 21 nt, RNAi-antisense strand
ggccaggacuuccaggacuuu

SEQ ID NO: 10132 - DNA, 21 bp, Homo sapiens
gaaagccaggtcctcatggtg

SEQ ID NO: 10133 - RNA, 21 nt, RNAi-sense strand
aagccagguccucaugguguu

SEQ ID NO: 10134 - RNA, 21 nt, RNAi-antisense strand
caccaugaggaccuggcuuuu

SEQ ID NO: 10135 - DNA, 21 bp, Homo sapiens
gatttccaggatctcctggac

SEQ ID NO: 10136 - RNA, 21 nt, RNAi-sense strand
uuuccaggaucuccuggacuu

SEQ ID NO: 10137 - RNA, 21 nt, RNAi-antisense strand
guccaggagauccuggaaauu

SEQ ID NO: 10138 - DNA, 21 bp, Homo sapiens
gaggtgaccaaggacgtgatg

SEQ ID NO: 10139 - RNA, 21 nt, RNAi-sense strand
ggugaccaaggacgugauguu

SEQ ID NO: 10140 - RNA, 21 nt, RNAi-antisense strand
caucacguccuuggucaccuu

SEQ ID NO: 10141 - DNA, 21 bp, Homo sapiens
gaccaaggacgtgatggaatt

SEQ ID NO: 10142 - RNA, 21 nt, RNAi-sense strand
ccaaggacgugauggaauuuu

SEQ ID NO: 10143 - RNA, 21 nt, RNAi-antisense strand
aauuccaucacguccuugguu

SEQ ID NO: 10144 - DNA, 21 bp, Homo sapiens
gacgtgatggaattcctggtc

SEQ ID NO: 10145 - RNA, 21 nt, RNAi-sense strand
cgugauggaauuccuggucuu

SEQ ID NO: 10146 - RNA, 21 nt, RNAi-antisense strand
gaccaggaauuccaucacguu

SEQ ID NO: 10147 - DNA, 21 bp, Homo sapiens
gatggaattcctggtccagcc

SEQ ID NO: 10148 - RNA, 21 nt, RNAi-sense strand
uggaauuccugguccagccuu

SEQ ID NO: 10149 - RNA, 21 nt, RNAi-antisense strand
ggcuggaccaggaauuccauu

SEQ ID NO: 10150 - DNA, 21 bp, Homo sapiens
gaattcctggtccagccggag

SEQ ID NO: 10151 - RNA, 21 nt, RNAi-sense strand
auuccugguccagccggaguu

SEQ ID NO: 10152 - RNA, 21 nt, RNAi-antisense strand
cuccggcuggaccaggaauuu

SEQ ID NO: 10153 - DNA, 21 bp, Homo sapiens
gagatgctggacctcgaggac

SEQ ID NO: 10154 - RNA, 21 nt, RNAi-sense strand
gaugcuggaccucgaggacuu

SEQ ID NO: 10155 - RNA, 21 nt, RNAi-antisense strand
guccucgagguccagcaucuu

SEQ ID NO: 10156 - DNA, 21 bp, Homo sapiens
gacaggaaatcgtggtccacc

SEQ ID NO: 10157 - RNA, 21 nt, RNAi-sense strand
caggaaaucgugguccaccuu

SEQ ID NO: 10158 - RNA, 21 nt, RNAi-antisense strand
gguggaccacgauuuccuguu

SEQ ID NO: 10159 - DNA, 21 bp, Homo sapiens
gaaatcgtggtccaccaggct

SEQ ID NO: 10160 - RNA, 21 nt, RNAi-sense strand
aaucgugguccaccaggcuuu

SEQ ID NO: 10161 - RNA, 21 nt, RNAi-antisense strand
agccugguggaccacgauuuu

SEQ ID NO: 10162 - DNA, 21 bp, Homo sapiens
gagtcatgtaataggcataaa

SEQ ID NO: 10163 - RNA, 21 nt, RNAi-sense strand
gucauguaauaggcauaaauu

SEQ ID NO: 10164 - RNA, 21 nt, RNAi-antisense strand
uuuaugccuauuacaugacuu

SEQ ID NO: 10165 - DNA, 21 bp, Homo sapiens
gagcaccaggtactccaggtc

SEQ ID NO: 10166 - RNA, 21 nt, RNAi-sense strand
gcaccagguacuccaggucuu

SEQ ID NO: 10167 - RNA, 21 nt, RNAi-antisense strand
gaccuggaguaccuggugcuu

SEQ ID NO: 10168 - DNA, 21 bp, Homo sapiens
gaggtgatcctggattccagg

SEQ ID NO: 10169 - RNA, 21 nt, RNAi-sense strand
ggugauccuggauuccagguu

SEQ ID NO: 10170 - RNA, 21 nt, RNAi-antisense strand
ccuggaauccaggaucaccuu

SEQ ID NO: 10171 - DNA, 21 bp, Homo sapiens
gatttctaggatccattggac

SEQ ID NO: 10172 - RNA, 21 nt, RNAi-sense strand
uuucuaggauccauuggacuu

SEQ ID NO: 10173 - RNA, 21 nt, RNAi-antisense strand
guccaauggauccuagaaauu

SEQ ID NO: 10174 - DNA, 21 bp, Homo sapiens
gatccattggacctccaggac

SEQ ID NO: 10175 - RNA, 21 nt, RNAi-sense strand
uccauuggaccuccaggacuu

SEQ ID NO: 10176 - RNA, 21 nt, RNAi-antisense strand
guccuggagguccaauggauu

SEQ ID NO: 10177 - DNA, 21 bp, Homo sapiens
gaccacctggtgtacgtggag

SEQ ID NO: 10178 - RNA, 21 nt, RNAi-sense strand
ccaccugguguacguggaguu

SEQ ID NO: 10179 - RNA, 21 nt, RNAi-antisense strand
cuccacguacaccaggugguu

SEQ ID NO: 10180 - DNA, 21 bp, Homo sapiens
gaggtaagccaggcaaggatg

SEQ ID NO: 10181 - RNA, 21 nt, RNAi-sense strand
gguaagccaggcaaggauguu

SEQ ID NO: 10182 - RNA, 21 nt, RNAi-antisense strand
cauccuugccuggcuuaccuu

SEQ ID NO: 10183 - DNA, 21 bp, Homo sapiens
gaactcctggaccagctggag

SEQ ID NO: 10184 - RNA, 21 nt, RNAi-sense strand
acuccuggaccagcuggaguu

SEQ ID NO: 10185 - RNA, 21 nt, RNAi-antisense strand
cuccagcugguccaggaguuu

SEQ ID NO: 10186 - DNA, 21 bp, Homo sapiens
gagagccaggaccagctggat

SEQ ID NO: 10187 - RNA, 21 nt, RNAi-sense strand
gagccaggaccagcuggauuu

SEQ ID NO: 10188 - RNA, 21 nt, RNAi-antisense strand
auccagcugguccuggcucuu

SEQ ID NO: 10189 - DNA, 21 bp, Homo sapiens
gagccaggaccagctggatca

SEQ ID NO: 10190 - RNA, 21 nt, RNAi-sense strand
gccaggaccagcuggaucauu

SEQ ID NO: 10191 - RNA, 21 nt, RNAi-antisense strand
ugauccagcugguccuggcuu

SEQ ID NO: 10192 - DNA, 21 bp, Homo sapiens
gaccagctggatcagatggat

SEQ ID NO: 10193 - RNA, 21 nt, RNAi-sense strand
ccagcuggaucagauggauuu

SEQ ID NO: 10194 - RNA, 21 nt, RNAi-antisense strand
auccaucugauccagcugguu

SEQ ID NO: 10195 - DNA, 21 bp, Homo sapiens
gatcagatggattgccaggtt

SEQ ID NO: 10196 - RNA, 21 nt, RNAi-sense strand
ucagauggauugccagguuuu

SEQ ID NO: 10197 - RNA, 21 nt, RNAi-antisense strand
aaccuggcaauccaucugauu

SEQ ID NO: 10198 - DNA, 21 bp, Homo sapiens
gatggattgccaggtttgaaa

SEQ ID NO: 10199 - RNA, 21 nt, RNAi-sense strand
uggauugccagguuugaaauu

SEQ ID NO: 10200 - RNA, 21 nt, RNAi-antisense strand
uuucaaaccuggcaauccauu

SEQ ID NO: 10201 - DNA, 21 bp, Homo sapiens
gattgccaggtttgaaaggaa

SEQ ID NO: 10202 - RNA, 21 nt, RNAi-sense strand
uugccagguuugaaaggaauu

SEQ ID NO: 10203 - RNA, 21 nt, RNAi-antisense strand
uuccuuucaaaccuggcaauu

SEQ ID NO: 10204 - DNA, 21 bp, Homo sapiens
gagacagtggatcacctgcaa

SEQ ID NO: 10205 - RNA, 21 nt, RNAi-sense strand
gacaguggaucaccugcaauu

SEQ ID NO: 10206 - RNA, 21 nt, RNAi-antisense strand
uugcaggugauccacugucuu

SEQ ID NO: 10207 - DNA, 21 bp, Homo sapiens
gacagtggatcacctgcaacc

SEQ ID NO: 10208 - RNA, 21 nt, RNAi-sense strand
caguggaucaccugcaaccuu

SEQ ID NO: 10209 - RNA, 21 nt, RNAi-antisense strand
gguugcaggugauccacuguu

SEQ ID NO: 10210 - DNA, 21 bp, Homo sapiens
gatcacctgcaacctggacaa

SEQ ID NO: 10211 - RNA, 21 nt, RNAi-sense strand
ucaccugcaaccuggacaauu

SEQ ID NO: 10212 - RNA, 21 nt, RNAi-antisense strand
uuguccagguugcaggugauu

SEQ ID NO: 10213 - DNA, 21 bp, Homo sapiens
gacaacgagaggctttgtctt

SEQ ID NO: 10214 - RNA, 21 nt, RNAi-sense strand
caacgagaggcuuugucuuuu

SEQ ID NO: 10215 - RNA, 21 nt, RNAi-antisense strand
aagacaaagccucucguuguu

SEQ ID NO: 10216 - DNA, 21 bp, Homo sapiens
gacacagtcaaaccacagcaa

SEQ ID NO: 10217 - RNA, 21 nt, RNAi-sense strand
cacagucaaaccacagcaauu

SEQ ID NO: 10218 - RNA, 21 nt, RNAi-antisense strand
uugcugugguuugacuguguu

SEQ ID NO: 10219 - DNA, 21 bp, Homo sapiens
gacagtgccactctacagtgg

SEQ ID NO: 10220 - RNA, 21 nt, RNAi-sense strand
cagugccacucuacagugguu

SEQ ID NO: 10221 - RNA, 21 nt, RNAi-antisense strand
ccacuguagaguggcacuguu

SEQ ID NO: 10222 - DNA, 21 bp, Homo sapiens
gacaagaccttggaactcttg

SEQ ID NO: 10223 - RNA, 21 nt, RNAi-sense strand
caagaccuuggaacucuuguu

SEQ ID NO: 10224 - RNA, 21 nt, RNAi-antisense strand
caagaguuccaaggucuuguu

SEQ ID NO: 10225 - DNA, 21 bp, Homo sapiens
gaccttggaactcttggcagc

SEQ ID NO: 10226 - RNA, 21 nt, RNAi-sense strand
ccuuggaacucuuggcagcuu

SEQ ID NO: 10227 - RNA, 21 nt, RNAi-antisense strand
gcugccaagaguuccaagguu

SEQ ID NO: 10228 - DNA, 21 bp, Homo sapiens
gaactcttggcagctgcctgc

SEQ ID NO: 10229 - RNA, 21 nt, RNAi-sense strand
acucuuggcagcugccugcuu

SEQ ID NO: 10230 - RNA, 21 nt, RNAi-antisense strand
gcaggcagcugccaagaguuu

SEQ ID NO: 10231 - DNA, 21 bp, Homo sapiens
gatttaccacaatgccattct

SEQ ID NO: 10232 - RNA, 21 nt, RNAi-sense strand
uuuaccacaaugccauucuuu

SEQ ID NO: 10233 - RNA, 21 nt, RNAi-antisense strand
agaauggcauugugguaaauu

SEQ ID NO: 10234 - DNA, 21 bp, Homo sapiens
gaaatgattattcatactggc

SEQ ID NO: 10235 - RNA, 21 nt, RNAi-sense strand
aaugauuauucauacuggcuu

SEQ ID NO: 10236 - RNA, 21 nt, RNAi-antisense strand
gccaguaugaauaaucauuuu

SEQ ID NO: 10237 - DNA, 21 bp, Homo sapiens
gattattcatactggctgtca

SEQ ID NO: 10238 - RNA, 21 nt, RNAi-sense strand
uuauucauacuggcugucauu

SEQ ID NO: 10239 - RNA, 21 nt, RNAi-antisense strand
ugacagccaguaugaauaauu

SEQ ID NO: 10240 - DNA, 21 bp, Homo sapiens
gatgccaatgaacatggctcc

SEQ ID NO: 10241 - RNA, 21 nt, RNAi-sense strand
ugccaaugaacauggcuccuu

SEQ ID NO: 10242 - RNA, 21 nt, RNAi-antisense strand
ggagccauguucauuggcauu

SEQ ID NO: 10243 - DNA, 21 bp, Homo sapiens
gagccttatataagcagatgc

SEQ ID NO: 10244 - RNA, 21 nt, RNAi-sense strand
gccuuauauaagcagaugcuu

SEQ ID NO: 10245 - RNA, 21 nt, RNAi-antisense strand
gcaucugcuuauauaaggcuu

SEQ ID NO: 10246 - DNA, 21 bp, Homo sapiens
gatgcactgtttgtgaaggtc

SEQ ID NO: 10247 - RNA, 21 nt, RNAi-sense strand
ugcacuguuugugaaggucuu

SEQ ID NO: 10248 - RNA, 21 nt, RNAi-antisense strand
gaccuucacaaacagugcauu

SEQ ID NO: 10249 - DNA, 21 bp, Homo sapiens
gaaggtcctgcgatcgccata

SEQ ID NO: 10250 - RNA, 21 nt, RNAi-sense strand
agguccugcgaucgccauauu

SEQ ID NO: 10251 - RNA, 21 nt, RNAi-antisense strand
uauggcgaucgcaggaccuuu

SEQ ID NO: 10252 - DNA, 21 bp, Homo sapiens
gatcgccatagccgttcacag

SEQ ID NO: 10253 - RNA, 21 nt, RNAi-sense strand
ucgccauagccguucacaguu

SEQ ID NO: 10254 - RNA, 21 nt, RNAi-antisense strand
cugugaacggcuauggcgauu

SEQ ID NO: 10255 - DNA, 21 bp, Homo sapiens
gacattcctccatgtcctcac

SEQ ID NO: 10256 - RNA, 21 nt, RNAi-sense strand
cauuccuccauguccucacuu

SEQ ID NO: 10257 - RNA, 21 nt, RNAi-antisense strand
gugaggacauggaggaauguu

SEQ ID NO: 10258 - DNA, 21 bp, Homo sapiens
gatttctctctggaaaggatt

SEQ ID NO: 10259 - RNA, 21 nt, RNAi-sense strand
uuucucucuggaaaggauuuu

SEQ ID NO: 10260 - RNA, 21 nt, RNAi-antisense strand
aauccuuuccagagagaaauu

SEQ ID NO: 10261 - DNA, 21 bp, Homo sapiens
gaaagcctattccatcaactg

SEQ ID NO: 10262 - RNA, 21 nt, RNAi-sense strand
aagccuauuccaucaacuguu

SEQ ID NO: 10263 - RNA, 21 nt, RNAi-antisense strand
caguugauggaauaggcuuuu

SEQ ID NO: 10264 - DNA, 21 bp, Homo sapiens
gaacaaagtaatgacagaaca

SEQ ID NO: 10265 - RNA, 21 nt, RNAi-sense strand
acaaaguaaugacagaacauu

SEQ ID NO: 10266 - RNA, 21 nt, RNAi-antisense strand
uguucugucauuacuuuguuu

SEQ ID NO: 10267 - DNA, 21 bp, Homo sapiens
gacagaacatgctgttattta

SEQ ID NO: 10268 - RNA, 21 nt, RNAi-sense strand
cagaacaugcuguuauuuauu

SEQ ID NO: 10269 - RNA, 21 nt, RNAi-antisense strand
uaaauaacagcauguucuguu

SEQ ID NO: 10270 - DNA, 21 bp, Homo sapiens
gaacatgctgttatttaggta

SEQ ID NO: 10271 - RNA, 21 nt, RNAi-sense strand
acaugcuguuauuuagguauu

SEQ ID NO: 10272 - RNA, 21 nt, RNAi-antisense strand
uaccuaaauaacagcauguuu

SEQ ID NO: 10273 - DNA, 21 bp, Homo sapiens
gatgacttagtacaaagtttc

SEQ ID NO: 10274 - RNA, 21 nt, RNAi-sense strand
ugacuuaguacaaaguuucuu

SEQ ID NO: 10275 - RNA, 21 nt, RNAi-antisense strand
gaaacuuuguacuaagucauu

SEQ ID NO: 10276 - DNA, 21 bp, Homo sapiens
gattgtatgaagtttgaatgc

SEQ ID NO: 10277 - RNA, 21 nt, RNAi-sense strand
uuguaugaaguuugaaugcuu

SEQ ID NO: 10278 - RNA, 21 nt, RNAi-antisense strand
gcauucaaacuucauacaauu

SEQ ID NO: 10279 - DNA, 21 bp, Homo sapiens
gaagtttgaatgctgcacgtt

SEQ ID NO: 10280 - RNA, 21 nt, RNAi-sense strand
aguuugaaugcugcacguuuu

SEQ ID NO: 10281 - RNA, 21 nt, RNAi-antisense strand
aacgugcagcauucaaacuuu

SEQ ID NO: 10282 - DNA, 21 bp, Homo sapiens
gaatgctgcacgttatgaaat

SEQ ID NO: 10283 - RNA, 21 nt, RNAi-sense strand
augcugcacguuaugaaauuu

SEQ ID NO: 10284 - RNA, 21 nt, RNAi-antisense strand
auuucauaacgugcagcauuu

SEQ ID NO: 10285 - DNA, 21 bp, Homo sapiens
gaggctaaatcagtgtttgat

SEQ ID NO: 10286 - RNA, 21 nt, RNAi-sense strand
ggcuaaaucaguguuugauuu

SEQ ID NO: 10287 - RNA, 21 nt, RNAi-antisense strand
aucaaacacugauuuagccuu

SEQ ID NO: 10288 - DNA, 21 bp, Homo sapiens
gagcattgtgtatagaactgg

SEQ ID NO: 10289 - RNA, 21 nt, RNAi-sense strand
gcauuguguauagaacugguu

SEQ ID NO: 10290 - RNA, 21 nt, RNAi-antisense strand
ccaguucuauacacaaugcuu

SEQ ID NO: 10291 - DNA, 21 bp, Homo sapiens
gacctgctgaggaccgtaagg

SEQ ID NO: 10292 - RNA, 21 nt, RNAi-sense strand
ccugcugaggaccguaagguu

SEQ ID NO: 10293 - RNA, 21 nt, RNAi-antisense strand
ccuuacgguccucagcagguu

SEQ ID NO: 10294 - DNA, 21 bp, Homo sapiens
gaggaccgtaaggcctgatgg

SEQ ID NO: 10295 - RNA, 21 nt, RNAi-sense strand
ggaccguaaggccugaugguu

SEQ ID NO: 10296 - RNA, 21 nt, RNAi-antisense strand
ccaucaggccuuacgguccuu

SEQ ID NO: 10297 - DNA, 21 bp, Homo sapiens
gaccgtaaggcctgatggaac

SEQ ID NO: 10298 - RNA, 21 nt, RNAi-sense strand
ccguaaggccugauggaacuu

SEQ ID NO: 10299 - RNA, 21 nt, RNAi-antisense strand
guuccaucaggccuuacgguu

SEQ ID NO: 10300 - DNA, 21 bp, Homo sapiens
gatggaacacagaactgaact

SEQ ID NO: 10301 - RNA, 21 nt, RNAi-sense strand
uggaacacagaacugaacuuu

SEQ ID NO: 10302 - RNA, 21 nt, RNAi-antisense strand
aguucaguucuguguuccauu

SEQ ID NO: 10303 - DNA, 21 bp, Homo sapiens
gaacacagaactgaactgagg

SEQ ID NO: 10304 - RNA, 21 nt, RNAi-sense strand
acacagaacugaacugagguu

SEQ ID NO: 10305 - RNA, 21 nt, RNAi-antisense strand
ccucaguucaguucuguguuu

SEQ ID NO: 10306 - DNA, 21 bp, Homo sapiens
gaactgaactgaggttcatgg

SEQ ID NO: 10307 - RNA, 21 nt, RNAi-sense strand
acugaacugagguucaugguu

SEQ ID NO: 10308 - RNA, 21 nt, RNAi-antisense strand
ccaugaaccucaguucaguuu

SEQ ID NO: 10309 - DNA, 21 bp, Homo sapiens
gaattcattcactgtagctct

SEQ ID NO: 10310 - RNA, 21 nt, RNAi-sense strand
auucauucacuguagcucuuu

SEQ ID NO: 10311 - RNA, 21 nt, RNAi-antisense strand
agagcuacagugaaugaauuu

SEQ ID NO: 10312 - DNA, 21 bp, Homo sapiens
gaaatgtgcactttatcctca

SEQ ID NO: 10313 - RNA, 21 nt, RNAi-sense strand
aaugugcacuuuauccucauu

SEQ ID NO: 10314 - RNA, 21 nt, RNAi-antisense strand
ugaggauaaagugcacauuuu

SEQ ID NO: 10315 - DNA, 21 bp, Homo sapiens
gagcagttcaataatccatga

SEQ ID NO: 10316 - RNA, 21 nt, RNAi-sense strand
gcaguucaauaauccaugauu

SEQ ID NO: 10317 - RNA, 21 nt, RNAi-antisense strand
ucauggauuauugaacugcuu

SEQ ID NO: 10318 - DNA, 21 bp, Homo sapiens
gaaagaacttaaggcatttgt

SEQ ID NO: 10319 - RNA, 21 nt, RNAi-sense strand
aagaacuuaaggcauuuguuu

SEQ ID NO: 10320 - RNA, 21 nt, RNAi-antisense strand
acaaaugccuuaaguucuuuu

SEQ ID NO: 10321 - DNA, 21 bp, Homo sapiens
gaacttaaggcatttgttggt

SEQ ID NO: 10322 - RNA, 21 nt, RNAi-sense strand
acuuaaggcauuuguugguuu

SEQ ID NO: 10323 - RNA, 21 nt, RNAi-antisense strand
accaacaaaugccuuaaguuu

SEQ ID NO: 10324 - DNA, 21 bp, Homo sapiens
gaatatgtcatcactctaggt

SEQ ID NO: 10325 - RNA, 21 nt, RNAi-sense strand
auaugucaucacucuagguuu

SEQ ID NO: 10326 - RNA, 21 nt, RNAi-antisense strand
accuagagugaugacauauuu

SEQ ID NO: 10327 - DNA, 21 bp, Homo sapiens
gataattcagcaggccagtaa

SEQ ID NO: 10328 - RNA, 21 nt, RNAi-sense strand
uaauucagcaggccaguaauu

SEQ ID NO: 10329 - RNA, 21 nt, RNAi-antisense strand
uuacuggccugcugaauuauu

SEQ ID NO: 10330 - DNA, 21 bp, Homo sapiens
gaaactcaggcttctagtttc

SEQ ID NO: 10331 - RNA, 21 nt, RNAi-sense strand
aacucaggcuucuaguuucuu

SEQ ID NO: 10332 - RNA, 21 nt, RNAi-antisense strand
gaaacuagaagccugaguuuu

SEQ ID NO: 10333 - DNA, 21 bp, Homo sapiens
gagaagataaggtctgaataa

SEQ ID NO: 10334 - RNA, 21 nt, RNAi-sense strand
gaagauaaggucugaauaauu

SEQ ID NO: 10335 - RNA, 21 nt, RNAi-antisense strand
uuauucagaccuuaucuucuu

SEQ ID NO: 10336 - DNA, 21 bp, Homo sapiens
gataaggtctgaataatagca

SEQ ID NO: 10337 - RNA, 21 nt, RNAi-sense strand
uaaggucugaauaauagcauu

SEQ ID NO: 10338 - RNA, 21 nt, RNAi-antisense strand
ugcuauuauucagaccuuauu

SEQ ID NO: 10339 - DNA, 21 bp, Homo sapiens
gatgataacactattgatgag

SEQ ID NO: 10340 - RNA, 21 nt, RNAi-sense strand
ugauaacacuauugaugaguu

SEQ ID NO: 10341 - RNA, 21 nt, RNAi-antisense strand
cucaucaauaguguuaucauu

SEQ ID NO: 10342 - DNA, 21 bp, Homo sapiens
gataacactattgatgagtct

SEQ ID NO: 10343 - RNA, 21 nt, RNAi-sense strand
uaacacuauugaugagucuuu

SEQ ID NO: 10344 - RNA, 21 nt, RNAi-antisense strand
agacucaucaauaguguuauu

SEQ ID NO: 10345 - DNA, 21 bp, Homo sapiens
gatgagtcttagagtccagac

SEQ ID NO: 10346 - RNA, 21 nt, RNAi-sense strand
ugagucuuagaguccagacuu

SEQ ID NO: 10347 - RNA, 21 nt, RNAi-antisense strand
gucuggacucuaagacucauu

SEQ ID NO: 10348 - DNA, 21 bp, Homo sapiens
gagtcttagagtccagacaca

SEQ ID NO: 10349 - RNA, 21 nt, RNAi-sense strand
gucuuagaguccagacacauu

SEQ ID NO: 10350 - RNA, 21 nt, RNAi-antisense strand
ugugucuggacucuaagacuu

SEQ ID NO: 10351 - DNA, 21 bp, Homo sapiens
gagtccagacacaaagagaca

SEQ ID NO: 10352 - RNA, 21 nt, RNAi-sense strand
guccagacacaaagagacauu

SEQ ID NO: 10353 - RNA, 21 nt, RNAi-antisense strand
ugucucuuugugucuggacuu

SEQ ID NO: 10354 - DNA, 21 bp, Homo sapiens
gacacaaagagacaaagcttt

SEQ ID NO: 10355 - RNA, 21 nt, RNAi-sense strand
cacaaagagacaaagcuuuuu

SEQ ID NO: 10356 - RNA, 21 nt, RNAi-antisense strand
aaagcuuugucucuuuguguu

SEQ ID NO: 10357 - DNA, 21 bp, Homo sapiens
gagacaaagctttgaagatgc

SEQ ID NO: 10358 - RNA, 21 nt, RNAi-sense strand
gacaaagcuuugaagaugcuu

SEQ ID NO: 10359 - RNA, 21 nt, RNAi-antisense strand
gcaucuucaaagcuuugucuu

SEQ ID NO: 10360 - DNA, 21 bp, Homo sapiens
gacaaagctttgaagatgctt

SEQ ID NO: 10361 - RNA, 21 nt, RNAi-sense strand
caaagcuuugaagaugcuuuu

SEQ ID NO: 10362 - RNA, 21 nt, RNAi-antisense strand
aagcaucuucaaagcuuuguu

SEQ ID NO: 10363 - DNA, 21 bp, Homo sapiens
gatctacctaggtggagttgg

SEQ ID NO: 10364 - RNA, 21 nt, RNAi-sense strand
ucuaccuagguggaguugguu

SEQ ID NO: 10365 - RNA, 21 nt, RNAi-antisense strand
ccaacuccaccuagguagauu

SEQ ID NO: 10366 - DNA, 21 bp, Homo sapiens
gagttggtggtgctgatattt

SEQ ID NO: 10367 - RNA, 21 nt, RNAi-sense strand
guugguggugcugauauuuuu

SEQ ID NO: 10368 - RNA, 21 nt, RNAi-antisense strand
aaauaucagcaccaccaacuu

SEQ ID NO: 10369 - DNA, 21 bp, Homo sapiens
gagacagacagactatggcca

SEQ ID NO: 10370 - RNA, 21 nt, RNAi-sense strand
gacagacagacuauggccauu

SEQ ID NO: 10371 - RNA, 21 nt, RNAi-antisense strand
uggccauagucugucugucuu

SEQ ID NO: 10372 - DNA, 21 bp, Homo sapiens
gacagacagactatggccatg

SEQ ID NO: 10373 - RNA, 21 nt, RNAi-sense strand
cagacagacuauggccauguu

SEQ ID NO: 10374 - RNA, 21 nt, RNAi-antisense strand
cauggccauagucugucuguu

SEQ ID NO: 10375 - DNA, 21 bp, Homo sapiens
gacagactatggccatggctc

SEQ ID NO: 10376 - RNA, 21 nt, RNAi-sense strand
cagacuauggccauggcucuu

SEQ ID NO: 10377 - RNA, 21 nt, RNAi-antisense strand
gagccauggccauagucuguu

SEQ ID NO: 10378 - DNA, 21 bp, Homo sapiens
gactatggccatggctcacat

SEQ ID NO: 10379 - RNA, 21 nt, RNAi-sense strand
cuauggccauggcucacauuu

SEQ ID NO: 10380 - RNA, 21 nt, RNAi-antisense strand
augugagccauggccauaguu

SEQ ID NO: 10381 - DNA, 21 bp, Homo sapiens
gaaactaagatgtgcagcatt

SEQ ID NO: 10382 - RNA, 21 nt, RNAi-sense strand
aacuaagaugugcagcauuuu

SEQ ID NO: 10383 - RNA, 21 nt, RNAi-antisense strand
aaugcugcacaucuuaguuuu

SEQ ID NO: 10384 - DNA, 21 bp, Homo sapiens
gatgtgcagcatttcacttat

SEQ ID NO: 10385 - RNA, 21 nt, RNAi-sense strand
ugugcagcauuucacuuauuu

SEQ ID NO: 10386 - RNA, 21 nt, RNAi-antisense strand
auaagugaaaugcugcacauu

SEQ ID NO: 10387 - DNA, 21 bp, Homo sapiens
gatatagagctagctaatctc

SEQ ID NO: 10388 - RNA, 21 nt, RNAi-sense strand
uauagagcuagcuaaucucuu

SEQ ID NO: 10389 - RNA, 21 nt, RNAi-antisense strand
gagauuagcuagcucuauauu

SEQ ID NO: 10390 - DNA, 21 bp, Homo sapiens
gagctagctaatctctacaaa

SEQ ID NO: 10391 - RNA, 21 nt, RNAi-sense strand
gcuagcuaaucucuacaaauu

SEQ ID NO: 10392 - RNA, 21 nt, RNAi-antisense strand
uuuguagagauuagcuagcuu

SEQ ID NO: 10393 - DNA, 21 bp, Homo sapiens
gaagagcagtatcagcatcat

SEQ ID NO: 10394 - RNA, 21 nt, RNAi-sense strand
agagcaguaucagcaucauuu

SEQ ID NO: 10395 - RNA, 21 nt, RNAi-antisense strand
augaugcugauacugcucuuu

SEQ ID NO: 10396 - DNA, 21 bp, Homo sapiens
gagcagtatcagcatcatctg

SEQ ID NO: 10397 - RNA, 21 nt, RNAi-sense strand
gcaguaucagcaucaucuguu

SEQ ID NO: 10398 - RNA, 21 nt, RNAi-antisense strand
cagaugaugcugauacugcuu

SEQ ID NO: 10399 - DNA, 21 bp, Homo sapiens
gaacttgtcacagatgcagat

SEQ ID NO: 10400 - RNA, 21 nt, RNAi-sense strand
acuugucacagaugcagauuu

SEQ ID NO: 10401 - RNA, 21 nt, RNAi-antisense strand
aucugcaucugugacaaguuu

SEQ ID NO: 10402 - DNA, 21 bp, Homo sapiens
gaccactccagacctacagaa

SEQ ID NO: 10403 - RNA, 21 nt, RNAi-sense strand
ccacuccagaccuacagaauu

SEQ ID NO: 10404 - RNA, 21 nt, RNAi-antisense strand
uucuguaggucuggagugguu

SEQ ID NO: 10405 - DNA, 21 bp, Homo sapiens
gacctacagaatcagaaactc

SEQ ID NO: 10406 - RNA, 21 nt, RNAi-sense strand
ccuacagaaucagaaacucuu

SEQ ID NO: 10407 - RNA, 21 nt, RNAi-antisense strand
gaguuucugauucuguagguu

SEQ ID NO: 10408 - DNA, 21 bp, Homo sapiens
gatgtactctaaatactgaga

SEQ ID NO: 10409 - RNA, 21 nt, RNAi-sense strand
uguacucuaaauacugagauu

SEQ ID NO: 10410 - RNA, 21 nt, RNAi-antisense strand
ucucaguauuuagaguacauu

SEQ ID NO: 10411 - DNA, 21 bp, Homo sapiens
gactctaaggttatctacttt

SEQ ID NO: 10412 - RNA, 21 nt, RNAi-sense strand
cucuaagguuaucuacuuuuu

SEQ ID NO: 10413 - RNA, 21 nt, RNAi-antisense strand
aaaguagauaaccuuagaguu

SEQ ID NO: 10414 - DNA, 21 bp, Homo sapiens
gactggtgctaatgtcaaacc

SEQ ID NO: 10415 - RNA, 21 nt, RNAi-sense strand
cuggugcuaaugucaaaccuu

SEQ ID NO: 10416 - RNA, 21 nt, RNAi-antisense strand
gguuugacauuagcaccaguu

SEQ ID NO: 10417 - DNA, 21 bp, Homo sapiens
gaggaagacaagtgatgctaa

SEQ ID NO: 10418 - RNA, 21 nt, RNAi-sense strand
ggaagacaagugaugcuaauu

SEQ ID NO: 10419 - RNA, 21 nt, RNAi-antisense strand
uuagcaucacuugucuuccuu

SEQ ID NO: 10420 - DNA, 21 bp, Homo sapiens
gaattccaatgaagccatatg

SEQ ID NO: 10421 - RNA, 21 nt, RNAi-sense strand
auuccaaugaagccauauguu

SEQ ID NO: 10422 - RNA, 21 nt, RNAi-antisense strand
cauauggcuucauuggaauuu

SEQ ID NO: 10423 - DNA, 21 bp, Homo sapiens
gaagccatatgaaccagctgt

SEQ ID NO: 10424 - RNA, 21 nt, RNAi-sense strand
agccauaugaaccagcuguuu

SEQ ID NO: 10425 - RNA, 21 nt, RNAi-antisense strand
acagcugguucauauggcuuu

SEQ ID NO: 10426 - DNA, 21 bp, Homo sapiens
gaaccagctgtcagttgcact

SEQ ID NO: 10427 - RNA, 21 nt, RNAi-sense strand
accagcugucaguugcacuuu

SEQ ID NO: 10428 - RNA, 21 nt, RNAi-antisense strand
agugcaacugacagcugguuu

SEQ ID NO: 10429 - DNA, 21 bp, Homo sapiens
gatacttagcttatgagtagc

SEQ ID NO: 10430 - RNA, 21 nt, RNAi-sense strand
uacuuagcuuaugaguagcuu

SEQ ID NO: 10431 - RNA, 21 nt, RNAi-antisense strand
gcuacucauaagcuaaguauu

SEQ ID NO: 10432 - DNA, 21 bp, Homo sapiens
gagtagcttatacaattagtg

SEQ ID NO: 10433 - RNA, 21 nt, RNAi-sense strand
guagcuuauacaauuaguguu

SEQ ID NO: 10434 - RNA, 21 nt, RNAi-antisense strand
cacuaauuguauaagcuacuu

SEQ ID NO: 10435 - DNA, 21 bp, Homo sapiens
gattcacagcgtgcatacaca

SEQ ID NO: 10436 - RNA, 21 nt, RNAi-sense strand
uucacagcgugcauacacauu

SEQ ID NO: 10437 - RNA, 21 nt, RNAi-antisense strand
uguguaugcacgcugugaauu

SEQ ID NO: 10438 - DNA, 21 bp, Homo sapiens
gattgtgagaagtcttcagca

SEQ ID NO: 10439 - RNA, 21 nt, RNAi-sense strand
uugugagaagucuucagcauu

SEQ ID NO: 10440 - RNA, 21 nt, RNAi-antisense strand
ugcugaagacuucucacaauu

SEQ ID NO: 10441 - DNA, 21 bp, Homo sapiens
gagaagtcttcagcaagataa

SEQ ID NO: 10442 - RNA, 21 nt, RNAi-sense strand
gaagucuucagcaagauaauu

SEQ ID NO: 10443 - RNA, 21 nt, RNAi-antisense strand
uuaucuugcugaagacuucuu

SEQ ID NO: 10444 - DNA, 21 bp, Homo sapiens
gaagtcttcagcaagataaac

SEQ ID NO: 10445 - RNA, 21 nt, RNAi-sense strand
agucuucagcaagauaaacuu

SEQ ID NO: 10446 - RNA, 21 nt, RNAi-antisense strand
guuuaucuugcugaagacuuu

SEQ ID NO: 10447 - DNA, 21 bp, Homo sapiens
gaacttgatggctaacttact

SEQ ID NO: 10448 - RNA, 21 nt, RNAi-sense strand
acuugauggcuaacuuacuuu

SEQ ID NO: 10449 - RNA, 21 nt, RNAi-antisense strand
aguaaguuagccaucaaguuu

SEQ ID NO: 10450 - DNA, 21 bp, Homo sapiens
gatggctaacttactaagatt

SEQ ID NO: 10451 - RNA, 21 nt, RNAi-sense strand
uggcuaacuuacuaagauuuu

SEQ ID NO: 10452 - RNA, 21 nt, RNAi-antisense strand
aaucuuaguaaguuagccauu

SEQ ID NO: 10453 - DNA, 21 bp, Homo sapiens
taaagacaaaggccagtgctt

SEQ ID NO: 10454 - RNA, 21 nt, RNAi-sense strand
aagacaaaggccagugcuuuu

SEQ ID NO: 10455 - RNA, 21 nt, RNAi-antisense strand
aagcacuggccuuugucuuuu

SEQ ID NO: 10456 - DNA, 21 bp, Homo sapiens
tacggacttgtcggtgtacca

SEQ ID NO: 10457 - RNA, 21 nt, RNAi-sense strand
cggacuugucgguguaccauu

SEQ ID NO: 10458 - RNA, 21 nt, RNAi-antisense strand
ugguacaccgacaaguccguu

SEQ ID NO: 10459 - DNA, 21 bp, Homo sapiens
taccaggatgcagtggttcta

SEQ ID NO: 10460 - RNA, 21 nt, RNAi-sense strand
ccaggaugcagugguucuauu

SEQ ID NO: 10461 - RNA, 21 nt, RNAi-antisense strand
uagaaccacugcauccugguu

SEQ ID NO: 10462 - DNA, 21 bp, Homo sapiens
tattatgacacataccaggaa

SEQ ID NO: 10463 - RNA, 21 nt, RNAi-sense strand
uuaugacacauaccaggaauu

SEQ ID NO: 10464 - RNA, 21 nt, RNAi-antisense strand
uuccugguaugugucauaauu

SEQ ID NO: 10465 - DNA, 21 bp, Homo sapiens
tacaggtcttccaggatttcc

SEQ ID NO: 10466 - RNA, 21 nt, RNAi-sense strand
caggucuuccaggauuuccuu

SEQ ID NO: 10467 - RNA, 21 nt, RNAi-antisense strand
ggaaauccuggaagaccuguu

SEQ ID NO: 10468 - DNA, 21 bp, Homo sapiens
taccaggacctaaaggcgaac

SEQ ID NO: 10469 - RNA, 21 nt, RNAi-sense strand
ccaggaccuaaaggcgaacuu

SEQ ID NO: 10470 - RNA, 21 nt, RNAi-antisense strand
guucgccuuuagguccugguu

SEQ ID NO: 10471 - DNA, 21 bp, Homo sapiens
taaaggcgaactggctctgag

SEQ ID NO: 10472 - RNA, 21 nt, RNAi-sense strand
aaggcgaacuggcucugaguu

SEQ ID NO: 10473 - RNA, 21 nt, RNAi-antisense strand
cucagagccaguucgccuuuu

SEQ ID NO: 10474 - DNA, 21 bp, Homo sapiens
tacctggaaagccaggcctcc

SEQ ID NO: 10475 - RNA, 21 nt, RNAi-sense strand
ccuggaaagccaggccuccuu

SEQ ID NO: 10476 - RNA, 21 nt, RNAi-antisense strand
ggaggccuggcuuuccagguu

SEQ ID NO: 10477 - DNA, 21 bp, Homo sapiens
tagccatgcctggaggaccag

SEQ ID NO: 10478 - RNA, 21 nt, RNAi-sense strand
gccaugccuggaggaccaguu

SEQ ID NO: 10479 - RNA, 21 nt, RNAi-antisense strand
cugguccuccaggcauggcuu

SEQ ID NO: 10480 - DNA, 21 bp, Homo sapiens
tagatcaggatttcctggaga

SEQ ID NO: 10481 - RNA, 21 nt, RNAi-sense strand
gaucaggauuuccuggagauu

SEQ ID NO: 10482 - RNA, 21 nt, RNAi-antisense strand
ucuccaggaaauccugaucuu

SEQ ID NO: 10483 - DNA, 21 bp, Homo sapiens
tattcagaaggtacaaggcca

SEQ ID NO: 10484 - RNA, 21 nt, RNAi-sense strand
uucagaagguacaaggccauu

SEQ ID NO: 10485 - RNA, 21 nt, RNAi-antisense strand
uggccuuguaccuucugaauu

SEQ ID NO: 10486 - DNA, 21 bp, Homo sapiens
taaaggaatcaaaggcctcct

SEQ ID NO: 10487 - RNA, 21 nt, RNAi-sense strand
aaggaaucaaaggccuccuuu

SEQ ID NO: 10488 - RNA, 21 nt, RNAi-antisense strand
aggaggccuuugauuccuuuu

SEQ ID NO: 10489 - DNA, 21 bp, Homo sapiens
tataagaggtgaccaaggacg

SEQ ID NO: 10490 - RNA, 21 nt, RNAi-sense strand
uaagaggugaccaaggacguu

SEQ ID NO: 10491 - RNA, 21 nt, RNAi-antisense strand
cguccuuggucaccucuuauu

SEQ ID NO: 10492 - DNA, 21 bp, Homo sapiens
taagaggtgaccaaggacgtg

SEQ ID NO: 10493 - RNA, 21 nt, RNAi-sense strand
agaggugaccaaggacguguu

SEQ ID NO: 10494 - RNA, 21 nt, RNAi-antisense strand
cacguccuuggucaccucuuu

SEQ ID NO: 10495 - DNA, 21 bp, Homo sapiens
tactccaggtcttccaggacc

SEQ ID NO: 10496 - RNA, 21 nt, RNAi-sense strand
cuccaggucuuccaggaccuu

SEQ ID NO: 10497 - RNA, 21 nt, RNAi-antisense strand
gguccuggaagaccuggaguu

SEQ ID NO: 10498 - DNA, 21 bp, Homo sapiens
taatcctggatttctaggatc

SEQ ID NO: 10499 - RNA, 21 nt, RNAi-sense strand
auccuggauuucuaggaucuu

SEQ ID NO: 10500 - RNA, 21 nt, RNAi-antisense strand
gauccuagaaauccaggauuu

SEQ ID NO: 10501 - DNA, 21 bp, Homo sapiens
taggatccattggacctccag

SEQ ID NO: 10502 - RNA, 21 nt, RNAi-sense strand
ggauccauuggaccuccaguu

SEQ ID NO: 10503 - RNA, 21 nt, RNAi-antisense strand
cuggagguccaauggauccuu

SEQ ID NO: 10504 - DNA, 21 bp, Homo sapiens
taagccaggcaaggatggaaa

SEQ ID NO: 10505 - RNA, 21 nt, RNAi-sense strand
agccaggcaaggauggaaauu

SEQ ID NO: 10506 - RNA, 21 nt, RNAi-antisense strand
uuuccauccuugccuggcuuu

SEQ ID NO: 10507 - DNA, 21 bp, Homo sapiens
taaaggagagccaggaccagc

SEQ ID NO: 10508 - RNA, 21 nt, RNAi-sense strand
aaggagagccaggaccagcuu

SEQ ID NO: 10509 - RNA, 21 nt, RNAi-antisense strand
gcugguccuggcucuccuuuu

SEQ ID NO: 10510 - DNA, 21 bp, Homo sapiens
taccacaatgccattcttatt

SEQ ID NO: 10511 - RNA, 21 nt, RNAi-sense strand
ccacaaugccauucuuauuuu

SEQ ID NO: 10512 - RNA, 21 nt, RNAi-antisense strand
aauaagaauggcauugugguu

SEQ ID NO: 10513 - DNA, 21 bp, Homo sapiens
tattctgcaatgtcaatgatg

SEQ ID NO: 10514 - RNA, 21 nt, RNAi-sense strand
uucugcaaugucaaugauguu

SEQ ID NO: 10515 - RNA, 21 nt, RNAi-antisense strand
caucauugacauugcagaauu

SEQ ID NO: 10516 - DNA, 21 bp, Homo sapiens
tattcatactggctgtcaaca

SEQ ID NO: 10517 - RNA, 21 nt, RNAi-sense strand
uucauacuggcugucaacauu

SEQ ID NO: 10518 - RNA, 21 nt, RNAi-antisense strand
uguugacagccaguaugaauu

SEQ ID NO: 10519 - DNA, 21 bp, Homo sapiens
tactggctgtcaacaccagct

SEQ ID NO: 10520 - RNA, 21 nt, RNAi-sense strand
cuggcugucaacaccagcuuu

SEQ ID NO: 10521 - RNA, 21 nt, RNAi-antisense strand
agcugguguugacagccaguu

SEQ ID NO: 10522 - DNA, 21 bp, Homo sapiens
tatataagcagatgcactgtt

SEQ ID NO: 10523 - RNA, 21 nt, RNAi-sense strand
uauaagcagaugcacuguuuu

SEQ ID NO: 10524 - RNA, 21 nt, RNAi-antisense strand
aacagugcaucugcuuauauu

SEQ ID NO: 10525 - DNA, 21 bp, Homo sapiens
tataagcagatgcactgtttg

SEQ ID NO: 10526 - RNA, 21 nt, RNAi-sense strand
uaagcagaugcacuguuuguu

SEQ ID NO: 10527 - RNA, 21 nt, RNAi-antisense strand
caaacagugcaucugcuuauu

SEQ ID NO: 10528 - DNA, 21 bp, Homo sapiens
taagcagatgcactgtttgtg

SEQ ID NO: 10529 - RNA, 21 nt, RNAi-sense strand
agcagaugcacuguuuguguu

SEQ ID NO: 10530 - RNA, 21 nt, RNAi-antisense strand
cacaaacagugcaucugcuuu

SEQ ID NO: 10531 - DNA, 21 bp, Homo sapiens
tagccgttcacagccaaacca

SEQ ID NO: 10532 - RNA, 21 nt, RNAi-sense strand
gccguucacagccaaaccauu

SEQ ID NO: 10533 - RNA, 21 nt, RNAi-antisense strand
ugguuuggcugugaacggcuu

SEQ ID NO: 10534 - DNA, 21 bp, Homo sapiens
tattccatcaactgtgaaagc

SEQ ID NO: 10535 - RNA, 21 nt, RNAi-sense strand
uuccaucaacugugaaagcuu

SEQ ID NO: 10536 - RNA, 21 nt, RNAi-antisense strand
gcuuucacaguugauggaauu

SEQ ID NO: 10537 - DNA, 21 bp, Homo sapiens
taataagtcgctgtcaggtgt

SEQ ID NO: 10538 - RNA, 21 nt, RNAi-sense strand
auaagucgcugucagguguuu

SEQ ID NO: 10539 - RNA, 21 nt, RNAi-antisense strand
acaccugacagcgacuuauuu

SEQ ID NO: 10540 - DNA, 21 bp, Homo sapiens
taagtcgctgtcaggtgtgca

SEQ ID NO: 10541 - RNA, 21 nt, RNAi-sense strand
agucgcugucaggugugcauu

SEQ ID NO: 10542 - RNA, 21 nt, RNAi-antisense strand
ugcacaccugacagcgacuuu

SEQ ID NO: 10543 - DNA, 21 bp, Homo sapiens
taatgacagaacatgctgtta

SEQ ID NO: 10544 - RNA, 21 nt, RNAi-sense strand
augacagaacaugcuguuauu

SEQ ID NO: 10545 - RNA, 21 nt, RNAi-antisense strand
uaacagcauguucugucauuu

SEQ ID NO: 10546 - DNA, 21 bp, Homo sapiens
taaccaaacaatattgctcca

SEQ ID NO: 10547 - RNA, 21 nt, RNAi-sense strand
accaaacaauauugcuccauu

SEQ ID NO: 10548 - RNA, 21 nt, RNAi-antisense strand
uggagcaauauuguuugguuu

SEQ ID NO: 10549 - DNA, 21 bp, Homo sapiens
tattgctccatgatgacttag

SEQ ID NO: 10550 - RNA, 21 nt, RNAi-sense strand
uugcuccaugaugacuuaguu

SEQ ID NO: 10551 - RNA, 21 nt, RNAi-antisense strand
cuaagucaucauggagcaauu

SEQ ID NO: 10552 - DNA, 21 bp, Homo sapiens
taatctgtgctgtttcaaagt

SEQ ID NO: 10553 - RNA, 21 nt, RNAi-sense strand
aucugugcuguuucaaaguuu

SEQ ID NO: 10554 - RNA, 21 nt, RNAi-antisense strand
acuuugaaacagcacagauuu

SEQ ID NO: 10555 - DNA, 21 bp, Homo sapiens
tattccacttacatccaaggc

SEQ ID NO: 10556 - RNA, 21 nt, RNAi-sense strand
uuccacuuacauccaaggcuu

SEQ ID NO: 10557 - RNA, 21 nt, RNAi-antisense strand
gccuuggauguaaguggaauu

SEQ ID NO: 10558 - DNA, 21 bp, Homo sapiens
tacatccaaggcactgtcact

SEQ ID NO: 10559 - RNA, 21 nt, RNAi-sense strand
cauccaaggcacugucacuuu

SEQ ID NO: 10560 - RNA, 21 nt, RNAi-antisense strand
agugacagugccuuggauguu

SEQ ID NO: 10561 - DNA, 21 bp, Homo sapiens
tacggtgattgtatgaagttt

SEQ ID NO: 10562 - RNA, 21 nt, RNAi-sense strand
cggugauuguaugaaguuuuu

SEQ ID NO: 10563 - RNA, 21 nt, RNAi-antisense strand
aaacuucauacaaucaccguu

SEQ ID NO: 10564 - DNA, 21 bp, Homo sapiens
tatgaagtttgaatgctgcac

SEQ ID NO: 10565 - RNA, 21 nt, RNAi-sense strand
ugaaguuugaaugcugcacuu

SEQ ID NO: 10566 - RNA, 21 nt, RNAi-antisense strand
gugcagcauucaaacuucauu

SEQ ID NO: 10567 - DNA, 21 bp, Homo sapiens
tatctggagcattgtgtatag

SEQ ID NO: 10568 - RNA, 21 nt, RNAi-sense strand
ucuggagcauuguguauaguu

SEQ ID NO: 10569 - RNA, 21 nt, RNAi-antisense strand
cuauacacaaugcuccagauu

SEQ ID NO: 10570 - DNA, 21 bp, Homo sapiens
taaggcctgatggaacacaga

SEQ ID NO: 10571 - RNA, 21 nt, RNAi-sense strand
aggccugauggaacacagauu

SEQ ID NO: 10572 - RNA, 21 nt, RNAi-antisense strand
ucuguguuccaucaggccuuu

SEQ ID NO: 10573 - DNA, 21 bp, Homo sapiens
taccagcatacgcacacaaat

SEQ ID NO: 10574 - RNA, 21 nt, RNAi-sense strand
ccagcauacgcacacaaauuu

SEQ ID NO: 10575 - RNA, 21 nt, RNAi-antisense strand
auuugugugcguaugcugguu

SEQ ID NO: 10576 - DNA, 21 bp, Homo sapiens
tacgcacacaaataacaagaa

SEQ ID NO: 10577 - RNA, 21 nt, RNAi-sense strand
cgcacacaaauaacaagaauu

SEQ ID NO: 10578 - RNA, 21 nt, RNAi-antisense strand
uucuuguuauuugugugcguu

SEQ ID NO: 10579 - DNA, 21 bp, Homo sapiens
tactacttatgaaatgtgcac

SEQ ID NO: 10580 - RNA, 21 nt, RNAi-sense strand
cuacuuaugaaaugugcacuu

SEQ ID NO: 10581 - RNA, 21 nt, RNAi-antisense strand
gugcacauuucauaaguaguu

SEQ ID NO: 10582 - DNA, 21 bp, Homo sapiens
tatgaaatgtgcactttatcc

SEQ ID NO: 10583 - RNA, 21 nt, RNAi-sense strand
ugaaaugugcacuuuauccuu

SEQ ID NO: 10584 - RNA, 21 nt, RNAi-antisense strand
ggauaaagugcacauuucauu

SEQ ID NO: 10585 - DNA, 21 bp, Homo sapiens
taaatgttggtgcatacctta

SEQ ID NO: 10586 - RNA, 21 nt, RNAi-sense strand
aauguuggugcauaccuuauu

SEQ ID NO: 10587 - RNA, 21 nt, RNAi-antisense strand
uaagguaugcaccaacauuuu

SEQ ID NO: 10588 - DNA, 21 bp, Homo sapiens
taaggcatttgttggtttatc

SEQ ID NO: 10589 - RNA, 21 nt, RNAi-sense strand
aggcauuuguugguuuaucuu

SEQ ID NO: 10590 - RNA, 21 nt, RNAi-antisense strand
gauaaaccaacaaaugccuuu

SEQ ID NO: 10591 - DNA, 21 bp, Homo sapiens
tatcagactcggaatctattt

SEQ ID NO: 10592 - RNA, 21 nt, RNAi-sense strand
ucagacucggaaucuauuuuu

SEQ ID NO: 10593 - RNA, 21 nt, RNAi-antisense strand
aaauagauuccgagucugauu

SEQ ID NO: 10594 - DNA, 21 bp, Homo sapiens
tacaaaccatactgaaagagt

SEQ ID NO: 10595 - RNA, 21 nt, RNAi-sense strand
caaaccauacugaaagaguuu

SEQ ID NO: 10596 - RNA, 21 nt, RNAi-antisense strand
acucuuucaguaugguuuguu

SEQ ID NO: 10597 - DNA, 21 bp, Homo sapiens
tatcaaactgtataacttggc

SEQ ID NO: 10598 - RNA, 21 nt, RNAi-sense strand
ucaaacuguauaacuuggcuu

SEQ ID NO: 10599 - RNA, 21 nt, RNAi-antisense strand
gccaaguuauacaguuugauu

SEQ ID NO: 10600 - DNA, 21 bp, Homo sapiens
tataacttggccgctgtatgt

SEQ ID NO: 10601 - RNA, 21 nt, RNAi-sense strand
uaacuuggccgcuguauguuu

SEQ ID NO: 10602 - RNA, 21 nt, RNAi-antisense strand
acauacagcggccaaguuauu

SEQ ID NO: 10603 - DNA, 21 bp, Homo sapiens
taacttggccgctgtatgtct

SEQ ID NO: 10604 - RNA, 21 nt, RNAi-sense strand
acuuggccgcuguaugucuuu

SEQ ID NO: 10605 - RNA, 21 nt, RNAi-antisense strand
agacauacagcggccaaguuu

SEQ ID NO: 10606 - DNA, 21 bp, Homo sapiens
tatcatgttattcagcaccaa

SEQ ID NO: 10607 - RNA, 21 nt, RNAi-sense strand
ucauguuauucagcaccaauu

SEQ ID NO: 10608 - RNA, 21 nt, RNAi-antisense strand
uuggugcugaauaacaugauu

SEQ ID NO: 10609 - DNA, 21 bp, Homo sapiens
tattcagcaccaagcatgtcc

SEQ ID NO: 10610 - RNA, 21 nt, RNAi-sense strand
uucagcaccaagcauguccuu

SEQ ID NO: 10611 - RNA, 21 nt, RNAi-antisense strand
ggacaugcuuggugcugaauu

SEQ ID NO: 10612 - DNA, 21 bp, Homo sapiens
tactaacctacagagatgcta

SEQ ID NO: 10613 - RNA, 21 nt, RNAi-sense strand
cuaaccuacagagaugcuauu

SEQ ID NO: 10614 - RNA, 21 nt, RNAi-antisense strand
uagcaucucuguagguuaguu

SEQ ID NO: 10615 - DNA, 21 bp, Homo sapiens
taacctacagagatgctaaga

SEQ ID NO: 10616 - RNA, 21 nt, RNAi-sense strand
accuacagagaugcuaagauu

SEQ ID NO: 10617 - RNA, 21 nt, RNAi-antisense strand
ucuuagcaucucuguagguuu

SEQ ID NO: 10618 - DNA, 21 bp, Homo sapiens
taatctcacatatacagtagc

SEQ ID NO: 10619 - RNA, 21 nt, RNAi-sense strand
aucucacauauacaguagcuu

SEQ ID NO: 10620 - RNA, 21 nt, RNAi-antisense strand
gcuacuguauaugugagauuu

SEQ ID NO: 10621 - DNA, 21 bp, Homo sapiens
taattcagcaggccagtaagg

SEQ ID NO: 10622 - RNA, 21 nt, RNAi-sense strand
auucagcaggccaguaagguu

SEQ ID NO: 10623 - RNA, 21 nt, RNAi-antisense strand
ccuuacuggccugcugaauuu

SEQ ID NO: 10624 - DNA, 21 bp, Homo sapiens
taagagaagataaggtctgaa

SEQ ID NO: 10625 - RNA, 21 nt, RNAi-sense strand
agagaagauaaggucugaauu

SEQ ID NO: 10626 - RNA, 21 nt, RNAi-antisense strand
uucagaccuuaucuucucuuu

SEQ ID NO: 10627 - DNA, 21 bp, Homo sapiens
taaggtctgaataatagcaga

SEQ ID NO: 10628 - RNA, 21 nt, RNAi-sense strand
aggucugaauaauagcagauu

SEQ ID NO: 10629 - RNA, 21 nt, RNAi-antisense strand
ucugcuauuauucagaccuuu

SEQ ID NO: 10630 - DNA, 21 bp, Homo sapiens
tattgatgagtcttagagtcc

SEQ ID NO: 10631 - RNA, 21 nt, RNAi-sense strand
uugaugagucuuagaguccuu

SEQ ID NO: 10632 - RNA, 21 nt, RNAi-antisense strand
ggacucuaagacucaucaauu

SEQ ID NO: 10633 - DNA, 21 bp, Homo sapiens
tagagtccagacacaaagaga

SEQ ID NO: 10634 - RNA, 21 nt, RNAi-sense strand
gaguccagacacaaagagauu

SEQ ID NO: 10635 - RNA, 21 nt, RNAi-antisense strand
ucucuuugugucuggacucuu

SEQ ID NO: 10636 - DNA, 21 bp, Homo sapiens
tacctaggtggagttggtggt

SEQ ID NO: 10637 - RNA, 21 nt, RNAi-sense strand
ccuagguggaguuggugguuu

SEQ ID NO: 10638 - RNA, 21 nt, RNAi-antisense strand
accaccaacuccaccuagguu

SEQ ID NO: 10639 - DNA, 21 bp, Homo sapiens
taggtggagttggtggtgctg

SEQ ID NO: 10640 - RNA, 21 nt, RNAi-sense strand
gguggaguugguggugcuguu

SEQ ID NO: 10641 - RNA, 21 nt, RNAi-antisense strand
cagcaccaccaacuccaccuu

SEQ ID NO: 10642 - DNA, 21 bp, Homo sapiens
tatttaaattcaggctactgc

SEQ ID NO: 10643 - RNA, 21 nt, RNAi-sense strand
uuuaaauucaggcuacugcuu

SEQ ID NO: 10644 - RNA, 21 nt, RNAi-antisense strand
gcaguagccugaauuuaaauu

SEQ ID NO: 10645 - DNA, 21 bp, Homo sapiens
taaattcaggctactgcttca

SEQ ID NO: 10646 - RNA, 21 nt, RNAi-sense strand
aauucaggcuacugcuucauu

SEQ ID NO: 10647 - RNA, 21 nt, RNAi-antisense strand
ugaagcaguagccugaauuuu

SEQ ID NO: 10648 - DNA, 21 bp, Homo sapiens
tactgcttcaatctcaattgc

SEQ ID NO: 10649 - RNA, 21 nt, RNAi-sense strand
cugcuucaaucucaauugcuu

SEQ ID NO: 10650 - RNA, 21 nt, RNAi-antisense strand
gcaauugagauugaagcaguu

SEQ ID NO: 10651 - DNA, 21 bp, Homo sapiens
tatggccatggctcacatggt

SEQ ID NO: 10652 - RNA, 21 nt, RNAi-sense strand
uggccauggcucacaugguuu

SEQ ID NO: 10653 - RNA, 21 nt, RNAi-antisense strand
accaugugagccauggccauu

SEQ ID NO: 10654 - DNA, 21 bp, Homo sapiens
tacatccttcactgctcacgt

SEQ ID NO: 10655 - RNA, 21 nt, RNAi-sense strand
cauccuucacugcucacguuu

SEQ ID NO: 10656 - RNA, 21 nt, RNAi-antisense strand
acgugagcagugaaggauguu

SEQ ID NO: 10657 - DNA, 21 bp, Homo sapiens
tacagtctgaaactaagatgt

SEQ ID NO: 10658 - RNA, 21 nt, RNAi-sense strand
cagucugaaacuaagauguuu

SEQ ID NO: 10659 - RNA, 21 nt, RNAi-antisense strand
acaucuuaguuucagacuguu

SEQ ID NO: 10660 - DNA, 21 bp, Homo sapiens
taagatgtgcagcatttcact

SEQ ID NO: 10661 - RNA, 21 nt, RNAi-sense strand
agaugugcagcauuucacuuu

SEQ ID NO: 10662 - RNA, 21 nt, RNAi-antisense strand
agugaaaugcugcacaucuuu

SEQ ID NO: 10663 - DNA, 21 bp, Homo sapiens
tactatagcggatatagagct

SEQ ID NO: 10664 - RNA, 21 nt, RNAi-sense strand
cuauagcggauauagagcuuu

SEQ ID NO: 10665 - RNA, 21 nt, RNAi-antisense strand
agcucuauauccgcuauaguu

SEQ ID NO: 10666 - DNA, 21 bp, Homo sapiens
tatagcggatatagagctagc

SEQ ID NO: 10667 - RNA, 21 nt, RNAi-sense strand
uagcggauauagagcuagcuu

SEQ ID NO: 10668 - RNA, 21 nt, RNAi-antisense strand
gcuagcucuauauccgcuauu

SEQ ID NO: 10669 - DNA, 21 bp, Homo sapiens
tagcggatatagagctagcta

SEQ ID NO: 10670 - RNA, 21 nt, RNAi-sense strand
gcggauauagagcuagcuauu

SEQ ID NO: 10671 - RNA, 21 nt, RNAi-antisense strand
uagcuagcucuauauccgcuu

SEQ ID NO: 10672 - DNA, 21 bp, Homo sapiens
tatagagctagctaatctcta

SEQ ID NO: 10673 - RNA, 21 nt, RNAi-sense strand
uagagcuagcuaaucucuauu

SEQ ID NO: 10674 - RNA, 21 nt, RNAi-antisense strand
uagagauuagcuagcucuauu

SEQ ID NO: 10675 - DNA, 21 bp, Homo sapiens
tagagctagctaatctctaca

SEQ ID NO: 10676 - RNA, 21 nt, RNAi-sense strand
gagcuagcuaaucucuacauu

SEQ ID NO: 10677 - RNA, 21 nt, RNAi-antisense strand
uguagagauuagcuagcucuu

SEQ ID NO: 10678 - DNA, 21 bp, Homo sapiens
taggccagtagttctcaaagt

SEQ ID NO: 10679 - RNA, 21 nt, RNAi-sense strand
ggccaguaguucucaaaguuu

SEQ ID NO: 10680 - RNA, 21 nt, RNAi-antisense strand
acuuugagaacuacuggccuu

SEQ ID NO: 10681 - DNA, 21 bp, Homo sapiens
tagttctcaaagtgtggtctc

SEQ ID NO: 10682 - RNA, 21 nt, RNAi-sense strand
guucucaaaguguggucucuu

SEQ ID NO: 10683 - RNA, 21 nt, RNAi-antisense strand
gagaccacacuuugagaacuu

SEQ ID NO: 10684 - DNA, 21 bp, Homo sapiens
tacagaatcagaaactcttgg

SEQ ID NO: 10685 - RNA, 21 nt, RNAi-sense strand
cagaaucagaaacucuugguu

SEQ ID NO: 10686 - RNA, 21 nt, RNAi-antisense strand
ccaagaguuucugauucuguu

SEQ ID NO: 10687 - DNA, 21 bp, Homo sapiens
tatcaatccaagcacactccg

SEQ ID NO: 10688 - RNA, 21 nt, RNAi-sense strand
ucaauccaagcacacuccguu

SEQ ID NO: 10689 - RNA, 21 nt, RNAi-antisense strand
cggagugugcuuggauugauu

SEQ ID NO: 10690 - DNA, 21 bp, Homo sapiens
taccagtacggctggctacaa

SEQ ID NO: 10691 - RNA, 21 nt, RNAi-sense strand
ccaguacggcuggcuacaauu

SEQ ID NO: 10692 - RNA, 21 nt, RNAi-antisense strand
uuguagccagccguacugguu

SEQ ID NO: 10693 - DNA, 21 bp, Homo sapiens
tacggctggctacaactgctc

SEQ ID NO: 10694 - RNA, 21 nt, RNAi-sense strand
cggcuggcuacaacugcucuu

SEQ ID NO: 10695 - RNA, 21 nt, RNAi-antisense strand
gagcaguuguagccagccguu

SEQ ID NO: 10696 - DNA, 21 bp, Homo sapiens
tacaactgctccatccgtgcc

SEQ ID NO: 10697 - RNA, 21 nt, RNAi-sense strand
caacugcuccauccgugccuu

SEQ ID NO: 10698 - RNA, 21 nt, RNAi-antisense strand
ggcacggauggagcaguuguu

SEQ ID NO: 10699 - DNA, 21 bp, Homo sapiens
taaagttcaaactcacaggtg

SEQ ID NO: 10700 - RNA, 21 nt, RNAi-sense strand
aaguucaaacucacagguguu

SEQ ID NO: 10701 - RNA, 21 nt, RNAi-antisense strand
caccugugaguuugaacuuuu

SEQ ID NO: 10702 - DNA, 21 bp, Homo sapiens
tagactggtgctaatgtcaaa

SEQ ID NO: 10703 - RNA, 21 nt, RNAi-sense strand
gacuggugcuaaugucaaauu

SEQ ID NO: 10704 - RNA, 21 nt, RNAi-antisense strand
uuugacauuagcaccagucuu

SEQ ID NO: 10705 - DNA, 21 bp, Homo sapiens
taatgtcaaaccactggcctc

SEQ ID NO: 10706 - RNA, 21 nt, RNAi-sense strand
augucaaaccacuggccucuu

SEQ ID NO: 10707 - RNA, 21 nt, RNAi-antisense strand
gaggccagugguuugacauuu

SEQ ID NO: 10708 - DNA, 21 bp, Homo sapiens
taccagtatttaacttctgag

SEQ ID NO: 10709 - RNA, 21 nt, RNAi-sense strand
ccaguauuuaacuucugaguu

SEQ ID NO: 10710 - RNA, 21 nt, RNAi-antisense strand
cucagaaguuaaauacugguu

SEQ ID NO: 10711 - DNA, 21 bp, Homo sapiens
tatttaacttctgaggaagac

SEQ ID NO: 10712 - RNA, 21 nt, RNAi-sense strand
uuuaacuucugaggaagacuu

SEQ ID NO: 10713 - RNA, 21 nt, RNAi-antisense strand
gucuuccucagaaguuaaauu

SEQ ID NO: 10714 - DNA, 21 bp, Homo sapiens
taacttctgaggaagacaagt

SEQ ID NO: 10715 - RNA, 21 nt, RNAi-sense strand
acuucugaggaagacaaguuu

SEQ ID NO: 10716 - RNA, 21 nt, RNAi-antisense strand
acuugucuuccucagaaguuu

SEQ ID NO: 10717 - DNA, 21 bp, Homo sapiens
tatgaaccagctgtcagttgc

SEQ ID NO: 10718 - RNA, 21 nt, RNAi-sense strand
ugaaccagcugucaguugcuu

SEQ ID NO: 10719 - RNA, 21 nt, RNAi-antisense strand
gcaacugacagcugguucauu

SEQ ID NO: 10720 - DNA, 21 bp, Homo sapiens
tagctcatgtgcattatttca

SEQ ID NO: 10721 - RNA, 21 nt, RNAi-sense strand
gcucaugugcauuauuucauu

SEQ ID NO: 10722 - RNA, 21 nt, RNAi-antisense strand
ugaaauaaugcacaugagcuu

SEQ ID NO: 10723 - DNA, 21 bp, Homo sapiens
tacttagcttatgagtagctt

SEQ ID NO: 10724 - RNA, 21 nt, RNAi-sense strand
cuuagcuuaugaguagcuuuu

SEQ ID NO: 10725 - RNA, 21 nt, RNAi-antisense strand
aagcuacucauaagcuaaguu

SEQ ID NO: 10726 - DNA, 21 bp, Homo sapiens
tagcttatgagtagcttatac

SEQ ID NO: 10727 - RNA, 21 nt, RNAi-sense strand
gcuuaugaguagcuuauacuu

SEQ ID NO: 10728 - RNA, 21 nt, RNAi-antisense strand
guauaagcuacucauaagcuu

SEQ ID NO: 10729 - DNA, 21 bp, Homo sapiens
tacacagattgtgagaagtct

SEQ ID NO: 10730 - RNA, 21 nt, RNAi-sense strand
cacagauugugagaagucuuu

SEQ ID NO: 10731 - RNA, 21 nt, RNAi-antisense strand
agacuucucacaaucuguguu

SEQ ID NO: 10732 - DNA, 21 bp, Homo sapiens
tacatttgaacttgatggcta

SEQ ID NO: 10733 - RNA, 21 nt, RNAi-sense strand
cauuugaacuugauggcuauu

SEQ ID NO: 10734 - RNA, 21 nt, RNAi-antisense strand
uagccaucaaguucaaauguu

SEQ ID NO: 10735 - DNA, 21 bp, Homo sapiens
tatcaaatgtaacttactgcg

SEQ ID NO: 10736 - RNA, 21 nt, RNAi-sense strand
ucaaauguaacuuacugcguu

SEQ ID NO: 10737 - RNA, 21 nt, RNAi-antisense strand
cgcaguaaguuacauuugauu

SEQ ID NO: 10738 - DNA, 21 bp, Homo sapiens
taacttactgcgactaaactt

SEQ ID NO: 10739 - RNA, 21 nt, RNAi-sense strand
acuuacugcgacuaaacuuuu

SEQ ID NO: 10740 - RNA, 21 nt, RNAi-antisense strand
aaguuuagucgcaguaaguuu

SEQ ID NO: 10741 - DNA, 21 bp, Homo sapiens
aaaggattcacaggtcctgaa

SEQ ID NO: 10742 - RNA, 21 nt, RNAi-sense strand
aggauucacagguccugaauu

SEQ ID NO: 10743 - RNA, 21 nt, RNAi-antisense strand
uucaggaccugugaauccuuu

SEQ ID NO: 10744 - DNA, 21 bp, Homo sapiens
aaggattcacaggtcctgaag

SEQ ID NO: 10745 - RNA, 21 nt, RNAi-sense strand
ggauucacagguccugaaguu

SEQ ID NO: 10746 - RNA, 21 nt, RNAi-antisense strand
cuucaggaccugugaauccuu

SEQ ID NO: 10747 - DNA, 21 bp, Homo sapiens
aaaggattaccaggacctaaa

SEQ ID NO: 10748 - RNA, 21 nt, RNAi-sense strand
aggauuaccaggaccuaaauu

SEQ ID NO: 10749 - RNA, 21 nt, RNAi-antisense strand
uuuagguccugguaauccuuu

SEQ ID NO: 10750 - DNA, 21 bp, Homo sapiens
aattccaggcttggatagatc

SEQ ID NO: 10751 - RNA, 21 nt, RNAi-sense strand
uuccaggcuuggauagaucuu

SEQ ID NO: 10752 - RNA, 21 nt, RNAi-antisense strand
gaucuauccaagccuggaauu

SEQ ID NO: 10753 - DNA, 21 bp, Homo sapiens
aaaggaaacagaggcgttcca

SEQ ID NO: 10754 - RNA, 21 nt, RNAi-sense strand
aggaaacagaggcguuccauu

SEQ ID NO: 10755 - RNA, 21 nt, RNAi-antisense strand
uggaacgccucuguuuccuuu

SEQ ID NO: 10756 - DNA, 21 bp, Homo sapiens
aaggacgtgatggaattcctg

SEQ ID NO: 10757 - RNA, 21 nt, RNAi-sense strand
ggacgugauggaauuccuguu

SEQ ID NO: 10758 - RNA, 21 nt, RNAi-antisense strand
caggaauuccaucacguccuu

SEQ ID NO: 10759 - DNA, 21 bp, Homo sapiens
aatcctggatttctaggatcc

SEQ ID NO: 10760 - RNA, 21 nt, RNAi-sense strand
uccuggauuucuaggauccuu

SEQ ID NO: 10761 - RNA, 21 nt, RNAi-antisense strand
ggauccuagaaauccaggauu

SEQ ID NO: 10762 - DNA, 21 bp, Homo sapiens
aaggcaacaaaggttctaaag

SEQ ID NO: 10763 - RNA, 21 nt, RNAi-sense strand
ggcaacaaagguucuaaaguu

SEQ ID NO: 10764 - RNA, 21 nt, RNAi-antisense strand
cuuuagaaccuuuguugccuu

SEQ ID NO: 10765 - DNA, 21 bp, Homo sapiens
aaggttctaaaggagagccag

SEQ ID NO: 10766 - RNA, 21 nt, RNAi-sense strand
gguucuaaaggagagccaguu

SEQ ID NO: 10767 - RNA, 21 nt, RNAi-antisense strand
cuggcucuccuuuagaaccuu

SEQ ID NO: 10768 - DNA, 21 bp, Homo sapiens
aagaccttggaactcttggca

SEQ ID NO: 10769 - RNA, 21 nt, RNAi-sense strand
gaccuuggaacucuuggcauu

SEQ ID NO: 10770 - RNA, 21 nt, RNAi-antisense strand
ugccaagaguuccaaggucuu

SEQ ID NO: 10771 - DNA, 21 bp, Homo sapiens
aaataataagtcgctgtcagg

SEQ ID NO: 10772 - RNA, 21 nt, RNAi-sense strand
auaauaagucgcugucagguu

SEQ ID NO: 10773 - RNA, 21 nt, RNAi-antisense strand
ccugacagcgacuuauuauuu

SEQ ID NO: 10774 - DNA, 21 bp, Homo sapiens
aataataagtcgctgtcaggt

SEQ ID NO: 10775 - RNA, 21 nt, RNAi-sense strand
uaauaagucgcugucagguuu

SEQ ID NO: 10776 - RNA, 21 nt, RNAi-antisense strand
accugacagcgacuuauuauu

SEQ ID NO: 10777 - DNA, 21 bp, Homo sapiens
cagataacagaacggacctca

SEQ ID NO: 10778 - RNA, 21 nt, RNAi-sense strand
gauaacagaacggaccucauu

SEQ ID NO: 10779 - RNA, 21 nt, RNAi-antisense strand
ugagguccguucuguuaucuu

SEQ ID NO: 10780 - DNA, 21 bp, Homo sapiens
caggatttcgtggtccaacag

SEQ ID NO: 10781 - RNA, 21 nt, RNAi-sense strand
ggauuucgugguccaacaguu

SEQ ID NO: 10782 - RNA, 21 nt, RNAi-antisense strand
cuguuggaccacgaaauccuu

SEQ ID NO: 10783 - DNA, 21 bp, Homo sapiens
caggaattccaggtcatcaag

SEQ ID NO: 10784 - RNA, 21 nt, RNAi-sense strand
ggaauuccaggucaucaaguu

SEQ ID NO: 10785 - RNA, 21 nt, RNAi-antisense strand
cuugaugaccuggaauuccuu

SEQ ID NO: 10786 - DNA, 21 bp, Homo sapiens
caaggacgtgatggaattcct

SEQ ID NO: 10787 - RNA, 21 nt, RNAi-sense strand
aggacgugauggaauuccuuu

SEQ ID NO: 10788 - RNA, 21 nt, RNAi-antisense strand
aggaauuccaucacguccuuu

SEQ ID NO: 10789 - DNA, 21 bp, Homo sapiens
cagacaggaaatcgtggtcca

SEQ ID NO: 10790 - RNA, 21 nt, RNAi-sense strand
gacaggaaaucgugguccauu

SEQ ID NO: 10791 - RNA, 21 nt, RNAi-antisense strand
uggaccacgauuuccugucuu

SEQ ID NO: 10792 - DNA, 21 bp, Homo sapiens
cagaggtgatcctggattcca

SEQ ID NO: 10793 - RNA, 21 nt, RNAi-sense strand
gaggugauccuggauuccauu

SEQ ID NO: 10794 - RNA, 21 nt, RNAi-antisense strand
uggaauccaggaucaccucuu

SEQ ID NO: 10795 - DNA, 21 bp, Homo sapiens
cagatggattgccaggtttga

SEQ ID NO: 10796 - RNA, 21 nt, RNAi-sense strand
gauggauugccagguuugauu

SEQ ID NO: 10797 - RNA, 21 nt, RNAi-antisense strand
ucaaaccuggcaauccaucuu

SEQ ID NO: 10798 - DNA, 21 bp, Homo sapiens
caaaccacagcaattccttca

SEQ ID NO: 10799 - RNA, 21 nt, RNAi-sense strand
aaccacagcaauuccuucauu

SEQ ID NO: 10800 - RNA, 21 nt, RNAi-antisense strand
ugaaggaauugcugugguuuu

SEQ ID NO: 10801 - DNA, 21 bp, Homo sapiens
cacggacaagaccttggaact

SEQ ID NO: 10802 - RNA, 21 nt, RNAi-sense strand
cggacaagaccuuggaacuuu

SEQ ID NO: 10803 - RNA, 21 nt, RNAi-antisense strand
aguuccaaggucuuguccguu

SEQ ID NO: 10804 - DNA, 21 bp, Homo sapiens
caagaccttggaactcttggc

SEQ ID NO: 10805 - RNA, 21 nt, RNAi-sense strand
agaccuuggaacucuuggcuu

SEQ ID NO: 10806 - RNA, 21 nt, RNAi-antisense strand
gccaagaguuccaaggucuuu

SEQ ID NO: 10807 - DNA, 21 bp, Homo sapiens
cacaatgccattcttattctg

SEQ ID NO: 10808 - RNA, 21 nt, RNAi-sense strand
caaugccauucuuauucuguu

SEQ ID NO: 10809 - RNA, 21 nt, RNAi-antisense strand
cagaauaagaauggcauuguu

SEQ ID NO: 10810 - DNA, 21 bp, Homo sapiens
caatgccattcttattctgca

SEQ ID NO: 10811 - RNA, 21 nt, RNAi-sense strand
augccauucuuauucugcauu

SEQ ID NO: 10812 - RNA, 21 nt, RNAi-antisense strand
ugcagaauaagaauggcauuu

SEQ ID NO: 10813 - DNA, 21 bp, Homo sapiens
cagctctgatgccaatgaaca

SEQ ID NO: 10814 - RNA, 21 nt, RNAi-sense strand
gcucugaugccaaugaacauu

SEQ ID NO: 10815 - RNA, 21 nt, RNAi-antisense strand
uguucauuggcaucagagcuu

SEQ ID NO: 10816 - DNA, 21 bp, Homo sapiens
cagccaaaccactgacattcc

SEQ ID NO: 10817 - RNA, 21 nt, RNAi-sense strand
gccaaaccacugacauuccuu

SEQ ID NO: 10818 - RNA, 21 nt, RNAi-antisense strand
ggaaugucagugguuuggcuu

SEQ ID NO: 10819 - DNA, 21 bp, Homo sapiens
catgtcctcacggctggattt

SEQ ID NO: 10820 - RNA, 21 nt, RNAi-sense strand
uguccucacggcuggauuuuu

SEQ ID NO: 10821 - RNA, 21 nt, RNAi-antisense strand
aaauccagccgugaggacauu

SEQ ID NO: 10822 - DNA, 21 bp, Homo sapiens
catcatgaaagcctattccat

SEQ ID NO: 10823 - RNA, 21 nt, RNAi-sense strand
ucaugaaagccuauuccauuu

SEQ ID NO: 10824 - RNA, 21 nt, RNAi-antisense strand
auggaauaggcuuucaugauu

SEQ ID NO: 10825 - DNA, 21 bp, Homo sapiens
gaaaggattcacaggtcctga

SEQ ID NO: 10826 - RNA, 21 nt, RNAi-sense strand
aaggauucacagguccugauu

SEQ ID NO: 10827 - RNA, 21 nt, RNAi-antisense strand
ucaggaccugugaauccuuuu

SEQ ID NO: 10828 - DNA, 21 bp, Homo sapiens
gattcacaggtcctgaaggct

SEQ ID NO: 10829 - RNA, 21 nt, RNAi-sense strand
uucacagguccugaaggcuuu

SEQ ID NO: 10830 - RNA, 21 nt, RNAi-antisense strand
agccuucaggaccugugaauu

SEQ ID NO: 10831 - DNA, 21 bp, Homo sapiens
gacttgtcggtgtaccaggat

SEQ ID NO: 10832 - RNA, 21 nt, RNAi-sense strand
cuugucgguguaccaggauuu

SEQ ID NO: 10833 - RNA, 21 nt, RNAi-antisense strand
auccugguacaccgacaaguu

SEQ ID NO: 10834 - DNA, 21 bp, Homo sapiens
gataacagaacggacctcaag

SEQ ID NO: 10835 - RNA, 21 nt, RNAi-sense strand
uaacagaacggaccucaaguu

SEQ ID NO: 10836 - RNA, 21 nt, RNAi-antisense strand
cuugagguccguucuguuauu

SEQ ID NO: 10837 - DNA, 21 bp, Homo sapiens
gactgcctggagaatcatatg

SEQ ID NO: 10838 - RNA, 21 nt, RNAi-sense strand
cugccuggagaaucauauguu

SEQ ID NO: 10839 - RNA, 21 nt, RNAi-antisense strand
cauaugauucuccaggcaguu

SEQ ID NO: 10840 - DNA, 21 bp, Homo sapiens
gatttcgtggtccaacagaat

SEQ ID NO: 10841 - RNA, 21 nt, RNAi-sense strand
uuucgugguccaacagaauuu

SEQ ID NO: 10842 - RNA, 21 nt, RNAi-antisense strand
auucuguuggaccacgaaauu

SEQ ID NO: 10843 - DNA, 21 bp, Homo sapiens
gatggccaggcttgaaaggaa

SEQ ID NO: 10844 - RNA, 21 nt, RNAi-sense strand
uggccaggcuugaaaggaauu

SEQ ID NO: 10845 - RNA, 21 nt, RNAi-antisense strand
uuccuuucaagccuggccauu

SEQ ID NO: 10846 - DNA, 21 bp, Homo sapiens
gaaaggattaccaggacctaa

SEQ ID NO: 10847 - RNA, 21 nt, RNAi-sense strand
aaggauuaccaggaccuaauu

SEQ ID NO: 10848 - RNA, 21 nt, RNAi-antisense strand
uuagguccugguaauccuuuu

SEQ ID NO: 10849 - DNA, 21 bp, Homo sapiens
gattaccaggacctaaaggcg

SEQ ID NO: 10850 - RNA, 21 nt, RNAi-sense strand
uuaccaggaccuaaaggcguu

SEQ ID NO: 10851 - RNA, 21 nt, RNAi-antisense strand
cgccuuuagguccugguaauu

SEQ ID NO: 10852 - DNA, 21 bp, Homo sapiens
gaattccaggcttggatagat

SEQ ID NO: 10853 - RNA, 21 nt, RNAi-sense strand
auuccaggcuuggauagauuu

SEQ ID NO: 10854 - RNA, 21 nt, RNAi-antisense strand
aucuauccaagccuggaauuu

SEQ ID NO: 10855 - DNA, 21 bp, Homo sapiens
gaaaggaaacagaggcgttcc

SEQ ID NO: 10856 - RNA, 21 nt, RNAi-sense strand
aaggaaacagaggcguuccuu

SEQ ID NO: 10857 - RNA, 21 nt, RNAi-antisense strand
ggaacgccucuguuuccuuuu

SEQ ID NO: 10858 - DNA, 21 bp, Homo sapiens
gaaccaggactccgtggtata

SEQ ID NO: 10859 - RNA, 21 nt, RNAi-sense strand
accaggacuccgugguauauu

SEQ ID NO: 10860 - RNA, 21 nt, RNAi-antisense strand
uauaccacggaguccugguuu

SEQ ID NO: 10861 - DNA, 21 bp, Homo sapiens
gaccaaggacgtgatggaatt

SEQ ID NO: 10862 - RNA, 21 nt, RNAi-sense strand
ccaaggacgugauggaauuuu

SEQ ID NO: 10863 - RNA, 21 nt, RNAi-antisense strand
aauuccaucacguccuugguu

SEQ ID NO: 10864 - DNA, 21 bp, Homo sapiens
gacgtgatggaattcctggtc

SEQ ID NO: 10865 - RNA, 21 nt, RNAi-sense strand
cgugauggaauuccuggucuu

SEQ ID NO: 10866 - RNA, 21 nt, RNAi-antisense strand
gaccaggaauuccaucacguu

SEQ ID NO: 10867 - DNA, 21 bp, Homo sapiens
gatggattgccaggtttgaaa

SEQ ID NO: 10868 - RNA, 21 nt, RNAi-sense strand
uggauugccagguuugaaauu

SEQ ID NO: 10869 - RNA, 21 nt, RNAi-antisense strand
uuucaaaccuggcaauccauu

SEQ ID NO: 10870 - DNA, 21 bp, Homo sapiens
gattgccaggtttgaaaggaa

SEQ ID NO: 10871 - RNA, 21 nt, RNAi-sense strand
uugccagguuugaaaggaauu

SEQ ID NO: 10872 - RNA, 21 nt, RNAi-antisense strand
uuccuuucaaaccuggcaauu

SEQ ID NO: 10873 - DNA, 21 bp, Homo sapiens
gacaacgagaggctttgtctt

SEQ ID NO: 10874 - RNA, 21 nt, RNAi-sense strand
caacgagaggcuuugucuuuu

SEQ ID NO: 10875 - RNA, 21 nt, RNAi-antisense strand
aagacaaagccucucguuguu

SEQ ID NO: 10876 - DNA, 21 bp, Homo sapiens
gacaagaccttggaactcttg

SEQ ID NO: 10877 - RNA, 21 nt, RNAi-sense strand
caagaccuuggaacucuuguu

SEQ ID NO: 10878 - RNA, 21 nt, RNAi-antisense strand
caagaguuccaaggucuuguu

SEQ ID NO: 10879 - DNA, 21 bp, Homo sapiens
tattcagaaggtacaaggcca

SEQ ID NO: 10880 - RNA, 21 nt, RNAi-sense strand
uucagaagguacaaggccauu

SEQ ID NO: 10881 - RNA, 21 nt, RNAi-antisense strand
uggccuuguaccuucugaauu

SEQ ID NO: 10882 - DNA, 21 bp, Homo sapiens
taccacaatgccattcttatt

SEQ ID NO: 10883 - RNA, 21 nt, RNAi-sense strand
ccacaaugccauucuuauuuu

SEQ ID NO: 10884 - RNA, 21 nt, RNAi-antisense strand
aauaagaauggcauugugguu

SEQ ID NO: 10885 - DNA, 21 bp, Homo sapiens
aatggcaggacaagcgtttag

SEQ ID NO: 10886 - RNA, 21 nt, RNAi-sense strand
uggcaggacaagcguuuaguu

SEQ ID NO: 10887 - RNA, 21 nt, RNAi-antisense strand
cuaaacgcuuguccugccauu

SEQ ID NO: 10888 - DNA, 21 bp, Homo sapiens
aagcgtttagaaagtttcttc

SEQ ID NO: 10889 - RNA, 21 nt, RNAi-sense strand
gcguuuagaaaguuucuucuu

SEQ ID NO: 10890 - RNA, 21 nt, RNAi-antisense strand
gaagaaacuuucuaaacgcuu

SEQ ID NO: 10891 - DNA, 21 bp, Homo sapiens
aaagtttcttccactctttga

SEQ ID NO: 10892 - RNA, 21 nt, RNAi-sense strand
aguuucuuccacucuuugauu

SEQ ID NO: 10893 - RNA, 21 nt, RNAi-antisense strand
ucaaagaguggaagaaacuuu

SEQ ID NO: 10894 - DNA, 21 bp, Homo sapiens
aagtttcttccactctttgac

SEQ ID NO: 10895 - RNA, 21 nt, RNAi-sense strand
guuucuuccacucuuugacuu

SEQ ID NO: 10896 - RNA, 21 nt, RNAi-antisense strand
gucaaagaguggaagaaacuu

SEQ ID NO: 10897 - DNA, 21 bp, Homo sapiens
aaaggagtgctgctgaaactg

SEQ ID NO: 10898 - RNA, 21 nt, RNAi-sense strand
aggagugcugcugaaacuguu

SEQ ID NO: 10899 - RNA, 21 nt, RNAi-antisense strand
caguuucagcagcacuccuuu

SEQ ID NO: 10900 - DNA, 21 bp, Homo sapiens
aaggagtgctgctgaaactgt

SEQ ID NO: 10901 - RNA, 21 nt, RNAi-sense strand
ggagugcugcugaaacuguuu

SEQ ID NO: 10902 - RNA, 21 nt, RNAi-antisense strand
acaguuucagcagcacuccuu

SEQ ID NO: 10903 - DNA, 21 bp, Homo sapiens
aaactgtaaccaaaggaggca

SEQ ID NO: 10904 - RNA, 21 nt, RNAi-sense strand
acuguaaccaaaggaggcauu

SEQ ID NO: 10905 - RNA, 21 nt, RNAi-antisense strand
ugccuccuuugguuacaguuu

SEQ ID NO: 10906 - DNA, 21 bp, Homo sapiens
aactgtaaccaaaggaggcat

SEQ ID NO: 10907 - RNA, 21 nt, RNAi-sense strand
cuguaaccaaaggaggcauuu

SEQ ID NO: 10908 - RNA, 21 nt, RNAi-antisense strand
augccuccuuugguuacaguu

SEQ ID NO: 10909 - DNA, 21 bp, Homo sapiens
aaccaaaggaggcattatgct

SEQ ID NO: 10910 - RNA, 21 nt, RNAi-sense strand
ccaaaggaggcauuaugcuuu

SEQ ID NO: 10911 - RNA, 21 nt, RNAi-antisense strand
agcauaaugccuccuuugguu

SEQ ID NO: 10912 - DNA, 21 bp, Homo sapiens
aaaggaggcattatgcttcca

SEQ ID NO: 10913 - RNA, 21 nt, RNAi-sense strand
aggaggcauuaugcuuccauu

SEQ ID NO: 10914 - RNA, 21 nt, RNAi-antisense strand
uggaagcauaaugccuccuuu

SEQ ID NO: 10915 - DNA, 21 bp, Homo sapiens
aaggaggcattatgcttccag

SEQ ID NO: 10916 - RNA, 21 nt, RNAi-sense strand
ggaggcauuaugcuuccaguu

SEQ ID NO: 10917 - RNA, 21 nt, RNAi-antisense strand
cuggaagcauaaugccuccuu

SEQ ID NO: 10918 - DNA, 21 bp, Homo sapiens
aaagtattgcaagcaacagta

SEQ ID NO: 10919 - RNA, 21 nt, RNAi-sense strand
aguauugcaagcaacaguauu

SEQ ID NO: 10920 - RNA, 21 nt, RNAi-antisense strand
uacuguugcuugcaauacuuu

SEQ ID NO: 10921 - DNA, 21 bp, Homo sapiens
aagtattgcaagcaacagtag

SEQ ID NO: 10922 - RNA, 21 nt, RNAi-sense strand
guauugcaagcaacaguaguu

SEQ ID NO: 10923 - RNA, 21 nt, RNAi-antisense strand
cuacuguugcuugcaauacuu

SEQ ID NO: 10924 - DNA, 21 bp, Homo sapiens
aagcaacagtagtcgctgttg

SEQ ID NO: 10925 - RNA, 21 nt, RNAi-sense strand
gcaacaguagucgcuguuguu

SEQ ID NO: 10926 - RNA, 21 nt, RNAi-antisense strand
caacagcgacuacuguugcuu

SEQ ID NO: 10927 - DNA, 21 bp, Homo sapiens
aacagtagtcgctgttggatc

SEQ ID NO: 10928 - RNA, 21 nt, RNAi-sense strand
caguagucgcuguuggaucuu

SEQ ID NO: 10929 - RNA, 21 nt, RNAi-antisense strand
gauccaacagcgacuacuguu

SEQ ID NO: 10930 - DNA, 21 bp, Homo sapiens
aaccagttagcgtgaaagttg

SEQ ID NO: 10931 - RNA, 21 nt, RNAi-sense strand
ccaguuagcgugaaaguuguu

SEQ ID NO: 10932 - RNA, 21 nt, RNAi-antisense strand
caacuuucacgcuaacugguu

SEQ ID NO: 10933 - DNA, 21 bp, Homo sapiens
aagttggagataaagttcttc

SEQ ID NO: 10934 - RNA, 21 nt, RNAi-sense strand
guuggagauaaaguucuucuu

SEQ ID NO: 10935 - RNA, 21 nt, RNAi-antisense strand
gaagaacuuuaucuccaacuu

SEQ ID NO: 10936 - DNA, 21 bp, Homo sapiens
aatatggaggcaccaaagtag

SEQ ID NO: 10937 - RNA, 21 nt, RNAi-sense strand
uauggaggcaccaaaguaguu

SEQ ID NO: 10938 - RNA, 21 nt, RNAi-antisense strand
cuacuuuggugccuccauauu

SEQ ID NO: 10939 - DNA, 21 bp, Homo sapiens
aaagtagttctagatgacaag

SEQ ID NO: 10940 - RNA, 21 nt, RNAi-sense strand
aguaguucuagaugacaaguu

SEQ ID NO: 10941 - RNA, 21 nt, RNAi-antisense strand
cuugucaucuagaacuacuuu

SEQ ID NO: 10942 - DNA, 21 bp, Homo sapiens
aagtagttctagatgacaagg

SEQ ID NO: 10943 - RNA, 21 nt, RNAi-sense strand
guaguucuagaugacaagguu

SEQ ID NO: 10944 - RNA, 21 nt, RNAi-antisense strand
ccuugucaucuagaacuacuu

SEQ ID NO: 10945 - DNA, 21 bp, Homo sapiens
aagtacgtagactgaaataag

SEQ ID NO: 10946 - RNA, 21 nt, RNAi-sense strand
guacguagacugaaauaaguu

SEQ ID NO: 10947 - RNA, 21 nt, RNAi-antisense strand
cuuauuucagucuacguacuu

SEQ ID NO: 10948 - DNA, 21 bp, Homo sapiens
aagtcactattgaaatggcat

SEQ ID NO: 10949 - RNA, 21 nt, RNAi-sense strand
gucacuauugaaauggcauuu

SEQ ID NO: 10950 - RNA, 21 nt, RNAi-antisense strand
augccauuucaauagugacuu

SEQ ID NO: 10951 - DNA, 21 bp, Homo sapiens
aaatggcatcaacatgatgct

SEQ ID NO: 10952 - RNA, 21 nt, RNAi-sense strand
auggcaucaacaugaugcuuu

SEQ ID NO: 10953 - RNA, 21 nt, RNAi-antisense strand
agcaucauguugaugccauuu

SEQ ID NO: 10954 - DNA, 21 bp, Homo sapiens
aatggcatcaacatgatgctg

SEQ ID NO: 10955 - RNA, 21 nt, RNAi-sense strand
uggcaucaacaugaugcuguu

SEQ ID NO: 10956 - RNA, 21 nt, RNAi-antisense strand
cagcaucauguugaugccauu

SEQ ID NO: 10957 - DNA, 21 bp, Homo sapiens
aagttctgaaatctttcgtca

SEQ ID NO: 10958 - RNA, 21 nt, RNAi-sense strand
guucugaaaucuuucgucauu

SEQ ID NO: 10959 - RNA, 21 nt, RNAi-antisense strand
ugacgaaagauuucagaacuu

SEQ ID NO: 10960 - DNA, 21 bp, Homo sapiens
aactaatgacatccagtgtct

SEQ ID NO: 10961 - RNA, 21 nt, RNAi-sense strand
cuaaugacauccagugucuuu

SEQ ID NO: 10962 - RNA, 21 nt, RNAi-antisense strand
agacacuggaugucauuaguu

SEQ ID NO: 10963 - DNA, 21 bp, Homo sapiens
aatgacatccagtgtctccaa

SEQ ID NO: 10964 - RNA, 21 nt, RNAi-sense strand
ugacauccagugucuccaauu

SEQ ID NO: 10965 - RNA, 21 nt, RNAi-antisense strand
uuggagacacuggaugucauu

SEQ ID NO: 10966 - DNA, 21 bp, Homo sapiens
cactagagcagagtacgagtc

SEQ ID NO: 10967 - RNA, 21 nt, RNAi-sense strand
cuagagcagaguacgagucuu

SEQ ID NO: 10968 - RNA, 21 nt, RNAi-antisense strand
gacucguacucugcucuaguu

SEQ ID NO: 10969 - DNA, 21 bp, Homo sapiens
cagagtacgagtctgaggcgg

SEQ ID NO: 10970 - RNA, 21 nt, RNAi-sense strand
gaguacgagucugaggcgguu

SEQ ID NO: 10971 - RNA, 21 nt, RNAi-antisense strand
ccgccucagacucguacucuu

SEQ ID NO: 10972 - DNA, 21 bp, Homo sapiens
caggacaagcgtttagaaagt

SEQ ID NO: 10973 - RNA, 21 nt, RNAi-sense strand
ggacaagcguuuagaaaguuu

SEQ ID NO: 10974 - RNA, 21 nt, RNAi-antisense strand
acuuucuaaacgcuuguccuu

SEQ ID NO: 10975 - DNA, 21 bp, Homo sapiens
caagcgtttagaaagtttctt

SEQ ID NO: 10976 - RNA, 21 nt, RNAi-sense strand
agcguuuagaaaguuucuuuu

SEQ ID NO: 10977 - RNA, 21 nt, RNAi-antisense strand
aagaaacuuucuaaacgcuuu

SEQ ID NO: 10978 - DNA, 21 bp, Homo sapiens
cactctttgaccgagtattgg

SEQ ID NO: 10979 - RNA, 21 nt, RNAi-sense strand
cucuuugaccgaguauugguu

SEQ ID NO: 10980 - RNA, 21 nt, RNAi-antisense strand
ccaauacucggucaaagaguu

SEQ ID NO: 10981 - DNA, 21 bp, Homo sapiens
caaaggaggcattatgcttcc

SEQ ID NO: 10982 - RNA, 21 nt, RNAi-sense strand
aaggaggcauuaugcuuccuu

SEQ ID NO: 10983 - RNA, 21 nt, RNAi-antisense strand
ggaagcauaaugccuccuuuu

SEQ ID NO: 10984 - DNA, 21 bp, Homo sapiens
caagcaacagtagtcgctgtt

SEQ ID NO: 10985 - RNA, 21 nt, RNAi-sense strand
agcaacaguagucgcuguuuu

SEQ ID NO: 10986 - RNA, 21 nt, RNAi-antisense strand
aacagcgacuacuguugcuuu

SEQ ID NO: 10987 - DNA, 21 bp, Homo sapiens
caacagtagtcgctgttggat

SEQ ID NO: 10988 - RNA, 21 nt, RNAi-sense strand
acaguagucgcuguuggauuu

SEQ ID NO: 10989 - RNA, 21 nt, RNAi-antisense strand
auccaacagcgacuacuguuu

SEQ ID NO: 10990 - DNA, 21 bp, Homo sapiens
cagtagtcgctgttggatcgg

SEQ ID NO: 10991 - RNA, 21 nt, RNAi-sense strand
guagucgcuguuggaucgguu

SEQ ID NO: 10992 - RNA, 21 nt, RNAi-antisense strand
ccgauccaacagcgacuacuu

SEQ ID NO: 10993 - DNA, 21 bp, Homo sapiens
caaccagttagcgtgaaagtt

SEQ ID NO: 10994 - RNA, 21 nt, RNAi-sense strand
accaguuagcgugaaaguuuu

SEQ ID NO: 10995 - RNA, 21 nt, RNAi-antisense strand
aacuuucacgcuaacugguuu

SEQ ID NO: 10996 - DNA, 21 bp, Homo sapiens
cagttagcgtgaaagttggag

SEQ ID NO: 10997 - RNA, 21 nt, RNAi-sense strand
guuagcgugaaaguuggaguu

SEQ ID NO: 10998 - RNA, 21 nt, RNAi-antisense strand
cuccaacuuucacgcuaacuu

SEQ ID NO: 10999 - DNA, 21 bp, Homo sapiens
cagaatatggaggcaccaaag

SEQ ID NO: 11000 - RNA, 21 nt, RNAi-sense strand
gaauauggaggcaccaaaguu

SEQ ID NO: 11001 - RNA, 21 nt, RNAi-antisense strand
cuuuggugccuccauauucuu

SEQ ID NO: 11002 - DNA, 21 bp, Homo sapiens
caccaaagtagttctagatga

SEQ ID NO: 11003 - RNA, 21 nt, RNAi-sense strand
ccaaaguaguucuagaugauu

SEQ ID NO: 11004 - RNA, 21 nt, RNAi-antisense strand
ucaucuagaacuacuuugguu

SEQ ID NO: 11005 - DNA, 21 bp, Homo sapiens
caaagtagttctagatgacaa

SEQ ID NO: 11006 - RNA, 21 nt, RNAi-sense strand
aaguaguucuagaugacaauu

SEQ ID NO: 11007 - RNA, 21 nt, RNAi-antisense strand
uugucaucuagaacuacuuuu

SEQ ID NO: 11008 - DNA, 21 bp, Homo sapiens
cattcttggaaagtacgtaga

SEQ ID NO: 11009 - RNA, 21 nt, RNAi-sense strand
uucuuggaaaguacguagauu

SEQ ID NO: 11010 - RNA, 21 nt, RNAi-antisense strand
ucuacguacuuuccaagaauu

SEQ ID NO: 11011 - DNA, 21 bp, Homo sapiens
cactattgaaatggcatcaac

SEQ ID NO: 11012 - RNA, 21 nt, RNAi-sense strand
cuauugaaauggcaucaacuu

SEQ ID NO: 11013 - RNA, 21 nt, RNAi-antisense strand
guugaugccauuucaauaguu

SEQ ID NO: 11014 - DNA, 21 bp, Homo sapiens
cattccactgaagttctgaaa

SEQ ID NO: 11015 - RNA, 21 nt, RNAi-sense strand
uuccacugaaguucugaaauu

SEQ ID NO: 11016 - RNA, 21 nt, RNAi-antisense strand
uuucagaacuucaguggaauu

SEQ ID NO: 11017 - DNA, 21 bp, Homo sapiens
cactgaagttctgaaatcttt

SEQ ID NO: 11018 - RNA, 21 nt, RNAi-sense strand
cugaaguucugaaaucuuuuu

SEQ ID NO: 11019 - RNA, 21 nt, RNAi-antisense strand
aaagauuucagaacuucaguu

SEQ ID NO: 11020 - DNA, 21 bp, Homo sapiens
gagcagagtacgagtctgagg

SEQ ID NO: 11021 - RNA, 21 nt, RNAi-sense strand
gcagaguacgagucugagguu

SEQ ID NO: 11022 - RNA, 21 nt, RNAi-antisense strand
ccucagacucguacucugcuu

SEQ ID NO: 11023 - DNA, 21 bp, Homo sapiens
gagtacgagtctgaggcggag

SEQ ID NO: 11024 - RNA, 21 nt, RNAi-sense strand
guacgagucugaggcggaguu

SEQ ID NO: 11025 - RNA, 21 nt, RNAi-antisense strand
cuccgccucagacucguacuu

SEQ ID NO: 11026 - DNA, 21 bp, Homo sapiens
gagtaatggcaggacaagcgt

SEQ ID NO: 11027 - RNA, 21 nt, RNAi-sense strand
guaauggcaggacaagcguuu

SEQ ID NO: 11028 - RNA, 21 nt, RNAi-antisense strand
acgcuuguccugccauuacuu

SEQ ID NO: 11029 - DNA, 21 bp, Homo sapiens
gacaagcgtttagaaagtttc

SEQ ID NO: 11030 - RNA, 21 nt, RNAi-sense strand
caagcguuuagaaaguuucuu

SEQ ID NO: 11031 - RNA, 21 nt, RNAi-antisense strand
gaaacuuucuaaacgcuuguu

SEQ ID NO: 11032 - DNA, 21 bp, Homo sapiens
gaaagtttcttccactctttg

SEQ ID NO: 11033 - RNA, 21 nt, RNAi-sense strand
aaguuucuuccacucuuuguu

SEQ ID NO: 11034 - RNA, 21 nt, RNAi-antisense strand
caaagaguggaagaaacuuuu

SEQ ID NO: 11035 - DNA, 21 bp, Homo sapiens
gaccgagtattggttgaaagg

SEQ ID NO: 11036 - RNA, 21 nt, RNAi-sense strand
ccgaguauugguugaaagguu

SEQ ID NO: 11037 - RNA, 21 nt, RNAi-antisense strand
ccuuucaaccaauacucgguu

SEQ ID NO: 11038 - DNA, 21 bp, Homo sapiens
gagtattggttgaaaggagtg

SEQ ID NO: 11039 - RNA, 21 nt, RNAi-sense strand
guauugguugaaaggaguguu

SEQ ID NO: 11040 - RNA, 21 nt, RNAi-antisense strand
cacuccuuucaaccaauacuu

SEQ ID NO: 11041 - DNA, 21 bp, Homo sapiens
gaaaggagtgctgctgaaact

SEQ ID NO: 11042 - RNA, 21 nt, RNAi-sense strand
aaggagugcugcugaaacuuu

SEQ ID NO: 11043 - RNA, 21 nt, RNAi-antisense strand
aguuucagcagcacuccuuuu

SEQ ID NO: 11044 - DNA, 21 bp, Homo sapiens
gagtgctgctgaaactgtaac

SEQ ID NO: 11045 - RNA, 21 nt, RNAi-sense strand
gugcugcugaaacuguaacuu

SEQ ID NO: 11046 - RNA, 21 nt, RNAi-antisense strand
guuacaguuucagcagcacuu

SEQ ID NO: 11047 - DNA, 21 bp, Homo sapiens
gaaactgtaaccaaaggaggc

SEQ ID NO: 11048 - RNA, 21 nt, RNAi-sense strand
aacuguaaccaaaggaggcuu

SEQ ID NO: 11049 - RNA, 21 nt, RNAi-antisense strand
gccuccuuugguuacaguuuu

SEQ ID NO: 11050 - DNA, 21 bp, Homo sapiens
gaggcattatgcttccagaaa

SEQ ID NO: 11051 - RNA, 21 nt, RNAi-sense strand
ggcauuaugcuuccagaaauu

SEQ ID NO: 11052 - RNA, 21 nt, RNAi-antisense strand
uuucuggaagcauaaugccuu

SEQ ID NO: 11053 - DNA, 21 bp, Homo sapiens
gagagattcaaccagttagcg

SEQ ID NO: 11054 - RNA, 21 nt, RNAi-sense strand
gagauucaaccaguuagcguu

SEQ ID NO: 11055 - RNA, 21 nt, RNAi-antisense strand
cgcuaacugguugaaucucuu

SEQ ID NO: 11056 - DNA, 21 bp, Homo sapiens
gagattcaaccagttagcgtg

SEQ ID NO: 11057 - RNA, 21 nt, RNAi-sense strand
gauucaaccaguuagcguguu

SEQ ID NO: 11058 - RNA, 21 nt, RNAi-antisense strand
cacgcuaacugguugaaucuu

SEQ ID NO: 11059 - DNA, 21 bp, Homo sapiens
gattcaaccagttagcgtgaa

SEQ ID NO: 11060 - RNA, 21 nt, RNAi-sense strand
uucaaccaguuagcgugaauu

SEQ ID NO: 11061 - RNA, 21 nt, RNAi-antisense strand
uucacgcuaacugguugaauu

SEQ ID NO: 11062 - DNA, 21 bp, Homo sapiens
gaaagttggagataaagttct

SEQ ID NO: 11063 - RNA, 21 nt, RNAi-sense strand
aaguuggagauaaaguucuuu

SEQ ID NO: 11064 - RNA, 21 nt, RNAi-antisense strand
agaacuuuaucuccaacuuuu

SEQ ID NO: 11065 - DNA, 21 bp, Homo sapiens
gaatatggaggcaccaaagta

SEQ ID NO: 11066 - RNA, 21 nt, RNAi-sense strand
auauggaggcaccaaaguauu

SEQ ID NO: 11067 - RNA, 21 nt, RNAi-antisense strand
uacuuuggugccuccauauuu

SEQ ID NO: 11068 - DNA, 21 bp, Homo sapiens
gaggcaccaaagtagttctag

SEQ ID NO: 11069 - RNA, 21 nt, RNAi-sense strand
ggcaccaaaguaguucuaguu

SEQ ID NO: 11070 - RNA, 21 nt, RNAi-antisense strand
cuagaacuacuuuggugccuu

SEQ ID NO: 11071 - DNA, 21 bp, Homo sapiens
gatgacaaggattatttccta

SEQ ID NO: 11072 - RNA, 21 nt, RNAi-sense strand
ugacaaggauuauuuccuauu

SEQ ID NO: 11073 - RNA, 21 nt, RNAi-antisense strand
uaggaaauaauccuugucauu

SEQ ID NO: 11074 - DNA, 21 bp, Homo sapiens
gagatggtgacattcttggaa

SEQ ID NO: 11075 - RNA, 21 nt, RNAi-sense strand
gauggugacauucuuggaauu

SEQ ID NO: 11076 - RNA, 21 nt, RNAi-antisense strand
uuccaagaaugucaccaucuu

SEQ ID NO: 11077 - DNA, 21 bp, Homo sapiens
gatggtgacattcttggaaag

SEQ ID NO: 11078 - RNA, 21 nt, RNAi-sense strand
uggugacauucuuggaaaguu

SEQ ID NO: 11079 - RNA, 21 nt, RNAi-antisense strand
cuuuccaagaaugucaccauu

SEQ ID NO: 11080 - DNA, 21 bp, Homo sapiens
gacattcttggaaagtacgta

SEQ ID NO: 11081 - RNA, 21 nt, RNAi-sense strand
cauucuuggaaaguacguauu

SEQ ID NO: 11082 - RNA, 21 nt, RNAi-antisense strand
uacguacuuuccaagaauguu

SEQ ID NO: 11083 - DNA, 21 bp, Homo sapiens
gaaagtacgtagactgaaata

SEQ ID NO: 11084 - RNA, 21 nt, RNAi-sense strand
aaguacguagacugaaauauu

SEQ ID NO: 11085 - RNA, 21 nt, RNAi-antisense strand
uauuucagucuacguacuuuu

SEQ ID NO: 11086 - DNA, 21 bp, Homo sapiens
gactgaaataagtcactattg

SEQ ID NO: 11087 - RNA, 21 nt, RNAi-sense strand
cugaaauaagucacuauuguu

SEQ ID NO: 11088 - RNA, 21 nt, RNAi-antisense strand
caauagugacuuauuucaguu

SEQ ID NO: 11089 - DNA, 21 bp, Homo sapiens
gaaatggcatcaacatgatgc

SEQ ID NO: 11090 - RNA, 21 nt, RNAi-sense strand
aauggcaucaacaugaugcuu

SEQ ID NO: 11091 - RNA, 21 nt, RNAi-antisense strand
gcaucauguugaugccauuuu

SEQ ID NO: 11092 - DNA, 21 bp, Homo sapiens
gaagttctgaaatctttcgtc

SEQ ID NO: 11093 - RNA, 21 nt, RNAi-sense strand
aguucugaaaucuuucgucuu

SEQ ID NO: 11094 - RNA, 21 nt, RNAi-antisense strand
gacgaaagauuucagaacuuu

SEQ ID NO: 11095 - DNA, 21 bp, Homo sapiens
gataactaatgacatccagtg

SEQ ID NO: 11096 - RNA, 21 nt, RNAi-sense strand
uaacuaaugacauccaguguu

SEQ ID NO: 11097 - RNA, 21 nt, RNAi-antisense strand
cacuggaugucauuaguuauu

SEQ ID NO: 11098 - DNA, 21 bp, Homo sapiens
tacactagagcagagtacgag

SEQ ID NO: 11099 - RNA, 21 nt, RNAi-sense strand
cacuagagcagaguacgaguu

SEQ ID NO: 11100 - RNA, 21 nt, RNAi-antisense strand
cucguacucugcucuaguguu

SEQ ID NO: 11101 - DNA, 21 bp, Homo sapiens
tagagcagagtacgagtctga

SEQ ID NO: 11102 - RNA, 21 nt, RNAi-sense strand
gagcagaguacgagucugauu

SEQ ID NO: 11103 - RNA, 21 nt, RNAi-antisense strand
ucagacucguacucugcucuu

SEQ ID NO: 11104 - DNA, 21 bp, Homo sapiens
taatggcaggacaagcgttta

SEQ ID NO: 11105 - RNA, 21 nt, RNAi-sense strand
auggcaggacaagcguuuauu

SEQ ID NO: 11106 - RNA, 21 nt, RNAi-antisense strand
uaaacgcuuguccugccauuu

SEQ ID NO: 11107 - DNA, 21 bp, Homo sapiens
tagaaagtttcttccactctt

SEQ ID NO: 11108 - RNA, 21 nt, RNAi-sense strand
gaaaguuucuuccacucuuuu

SEQ ID NO: 11109 - RNA, 21 nt, RNAi-antisense strand
aagaguggaagaaacuuucuu

SEQ ID NO: 11110 - DNA, 21 bp, Homo sapiens
tattggttgaaaggagtgctg

SEQ ID NO: 11111 - RNA, 21 nt, RNAi-sense strand
uugguugaaaggagugcuguu

SEQ ID NO: 11112 - RNA, 21 nt, RNAi-antisense strand
cagcacuccuuucaaccaauu

SEQ ID NO: 11113 - DNA, 21 bp, Homo sapiens
taaccaaaggaggcattatgc

SEQ ID NO: 11114 - RNA, 21 nt, RNAi-sense strand
accaaaggaggcauuaugcuu

SEQ ID NO: 11115 - RNA, 21 nt, RNAi-antisense strand
gcauaaugccuccuuugguuu

SEQ ID NO: 11116 - DNA, 21 bp, Homo sapiens
tattgcaagcaacagtagtcg

SEQ ID NO: 11117 - RNA, 21 nt, RNAi-sense strand
uugcaagcaacaguagucguu

SEQ ID NO: 11118 - RNA, 21 nt, RNAi-antisense strand
cgacuacuguugcuugcaauu

SEQ ID NO: 11119 - DNA, 21 bp, Homo sapiens
tagcgtgaaagttggagataa

SEQ ID NO: 11120 - RNA, 21 nt, RNAi-sense strand
gcgugaaaguuggagauaauu

SEQ ID NO: 11121 - RNA, 21 nt, RNAi-antisense strand
uuaucuccaacuuucacgcuu

SEQ ID NO: 11122 - DNA, 21 bp, Homo sapiens
tatggaggcaccaaagtagtt

SEQ ID NO: 11123 - RNA, 21 nt, RNAi-sense strand
uggaggcaccaaaguaguuuu

SEQ ID NO: 11124 - RNA, 21 nt, RNAi-antisense strand
aacuacuuuggugccuccauu

SEQ ID NO: 11125 - DNA, 21 bp, Homo sapiens
tagttctagatgacaaggatt

SEQ ID NO: 11126 - RNA, 21 nt, RNAi-sense strand
guucuagaugacaaggauuuu

SEQ ID NO: 11127 - RNA, 21 nt, RNAi-antisense strand
aauccuugucaucuagaacuu

SEQ ID NO: 11128 - DNA, 21 bp, Homo sapiens
tagatgacaaggattatttcc

SEQ ID NO: 11129 - RNA, 21 nt, RNAi-sense strand
gaugacaaggauuauuuccuu

SEQ ID NO: 11130 - RNA, 21 nt, RNAi-antisense strand
ggaaauaauccuugucaucuu

SEQ ID NO: 11131 - DNA, 21 bp, Homo sapiens
tatttagagatggtgacattc

SEQ ID NO: 11132 - RNA, 21 nt, RNAi-sense strand
uuuagagauggugacauucuu

SEQ ID NO: 11133 - RNA, 21 nt, RNAi-antisense strand
gaaugucaccaucucuaaauu

SEQ ID NO: 11134 - DNA, 21 bp, Homo sapiens
tagagatggtgacattcttgg

SEQ ID NO: 11135 - RNA, 21 nt, RNAi-sense strand
gagauggugacauucuugguu

SEQ ID NO: 11136 - RNA, 21 nt, RNAi-antisense strand
ccaagaaugucaccaucucuu

SEQ ID NO: 11137 - DNA, 21 bp, Homo sapiens
tacgtagactgaaataagtca

SEQ ID NO: 11138 - RNA, 21 nt, RNAi-sense strand
cguagacugaaauaagucauu

SEQ ID NO: 11139 - RNA, 21 nt, RNAi-antisense strand
ugacuuauuucagucuacguu

SEQ ID NO: 11140 - DNA, 21 bp, Homo sapiens
taagtcactattgaaatggca

SEQ ID NO: 11141 - RNA, 21 nt, RNAi-sense strand
agucacuauugaaauggcauu

SEQ ID NO: 11142 - RNA, 21 nt, RNAi-antisense strand
ugccauuucaauagugacuuu

SEQ ID NO: 11143 - DNA, 21 bp, Homo sapiens
tattgaaatggcatcaacatg

SEQ ID NO: 11144 - RNA, 21 nt, RNAi-sense strand
uugaaauggcaucaacauguu

SEQ ID NO: 11145 - RNA, 21 nt, RNAi-antisense strand
cauguugaugccauuucaauu

SEQ ID NO: 11146 - DNA, 21 bp, Homo sapiens
taactaatgacatccagtgtc

SEQ ID NO: 11147 - RNA, 21 nt, RNAi-sense strand
acuaaugacauccagugucuu

SEQ ID NO: 11148 - RNA, 21 nt, RNAi-antisense strand
gacacuggaugucauuaguuu

SEQ ID NO: 11149 - DNA, 21 bp, Homo sapiens
taatgacatccagtgtctcca

SEQ ID NO: 11150 - RNA, 21 nt, RNAi-sense strand
augacauccagugucuccauu

SEQ ID NO: 11151 - RNA, 21 nt, RNAi-antisense strand
uggagacacuggaugucauuu

SEQ ID NO: 11152 - DNA, 21 bp, Homo sapiens
aaccagttagcgtgaaagttg

SEQ ID NO: 11153 - RNA, 21 nt, RNAi-sense strand
ccaguuagcgugaaaguuguu

SEQ ID NO: 11154 - RNA, 21 nt, RNAi-antisense strand
caacuuucacgcuaacugguu

SEQ ID NO: 11155 - DNA, 21 bp, Homo sapiens
caaccagttagcgtgaaagtt

SEQ ID NO: 11156 - RNA, 21 nt, RNAi-sense strand
accaguuagcgugaaaguuuu

SEQ ID NO: 11157 - RNA, 21 nt, RNAi-antisense strand
aacuuucacgcuaacugguuu

SEQ ID NO: 11158 - DNA, 21 bp, Homo sapiens
aagatggcgctggtggcttct

SEQ ID NO: 11159 - RNA, 21 nt, RNAi-sense strand
gauggcgcugguggcuucuuu

SEQ ID NO: 11160 - RNA, 21 nt, RNAi-antisense strand
agaagccaccagcgccaucuu

SEQ ID NO: 11161 - DNA, 21 bp, Homo sapiens
aacagcctgagcctggagttt

SEQ ID NO: 11162 - RNA, 21 nt, RNAi-sense strand
cagccugagccuggaguuuuu

SEQ ID NO: 11163 - RNA, 21 nt, RNAi-antisense strand
aaacuccaggcucaggcuguu

SEQ ID NO: 11164 - DNA, 21 bp, Homo sapiens
aagctggagaatgacaagagc

SEQ ID NO: 11165 - RNA, 21 nt, RNAi-sense strand
gcuggagaaugacaagagcuu

SEQ ID NO: 11166 - RNA, 21 nt, RNAi-antisense strand
gcucuugucauucuccagcuu

SEQ ID NO: 11167 - DNA, 21 bp, Homo sapiens
aatgacaagagcttccgcggt

SEQ ID NO: 11168 - RNA, 21 nt, RNAi-sense strand
ugacaagagcuuccgcgguuu

SEQ ID NO: 11169 - RNA, 21 nt, RNAi-antisense strand
accgcggaagcucuugucauu

SEQ ID NO: 11170 - DNA, 21 bp, Homo sapiens
aagagcttccgcggtgtcatt

SEQ ID NO: 11171 - RNA, 21 nt, RNAi-sense strand
gagcuuccgcggugucauuuu

SEQ ID NO: 11172 - RNA, 21 nt, RNAi-antisense strand
aaugacaccgcggaagcucuu

SEQ ID NO: 11173 - DNA, 21 bp, Homo sapiens
aaggccgttcaggagctgtgg

SEQ ID NO: 11174 - RNA, 21 nt, RNAi-sense strand
ggccguucaggagcugugguu

SEQ ID NO: 11175 - RNA, 21 nt, RNAi-antisense strand
ccacagcuccugaacggccuu

SEQ ID NO: 11176 - DNA, 21 bp, Homo sapiens
aaggccatgatgcgaaaggcc

SEQ ID NO: 11177 - RNA, 21 nt, RNAi-sense strand
ggccaugaugcgaaaggccuu

SEQ ID NO: 11178 - RNA, 21 nt, RNAi-antisense strand
ggccuuucgcaucauggccuu

SEQ ID NO: 11179 - DNA, 21 bp, Homo sapiens
aacttcgtcagcttcatctcc

SEQ ID NO: 11180 - RNA, 21 nt, RNAi-sense strand
cuucgucagcuucaucuccuu

SEQ ID NO: 11181 - RNA, 21 nt, RNAi-antisense strand
ggagaugaagcugacgaaguu

SEQ ID NO: 11182 - DNA, 21 bp, Homo sapiens
aaagactccatccagaagtcc

SEQ ID NO: 11183 - RNA, 21 nt, RNAi-sense strand
agacuccauccagaaguccuu

SEQ ID NO: 11184 - RNA, 21 nt, RNAi-antisense strand
ggacuucuggauggagucuuu

SEQ ID NO: 11185 - DNA, 21 bp, Homo sapiens
caagatggcgctggtggcttc

SEQ ID NO: 11186 - RNA, 21 nt, RNAi-sense strand
agauggcgcugguggcuucuu

SEQ ID NO: 11187 - RNA, 21 nt, RNAi-antisense strand
gaagccaccagcgccaucuuu

SEQ ID NO: 11188 - DNA, 21 bp, Homo sapiens
cagtgaacagcctgagcctgg

SEQ ID NO: 11189 - RNA, 21 nt, RNAi-sense strand
gugaacagccugagccugguu

SEQ ID NO: 11190 - RNA, 21 nt, RNAi-antisense strand
ccaggcucaggcuguucacuu

SEQ ID NO: 11191 - DNA, 21 bp, Homo sapiens
cagcctgagcctggagtttct

SEQ ID NO: 11192 - RNA, 21 nt, RNAi-sense strand
gccugagccuggaguuucuuu

SEQ ID NO: 11193 - RNA, 21 nt, RNAi-antisense strand
agaaacuccaggcucaggcuu

SEQ ID NO: 11194 - DNA, 21 bp, Homo sapiens
catcagcctggagaagctgga

SEQ ID NO: 11195 - RNA, 21 nt, RNAi-sense strand
ucagccuggagaagcuggauu

SEQ ID NO: 11196 - RNA, 21 nt, RNAi-antisense strand
uccagcuucuccaggcugauu

SEQ ID NO: 11197 - DNA, 21 bp, Homo sapiens
cagcctggagaagctggagaa

SEQ ID NO: 11198 - RNA, 21 nt, RNAi-sense strand
gccuggagaagcuggagaauu

SEQ ID NO: 11199 - RNA, 21 nt, RNAi-antisense strand
uucuccagcuucuccaggcuu

SEQ ID NO: 11200 - DNA, 21 bp, Homo sapiens
caagagcttccgcggtgtcat

SEQ ID NO: 11201 - RNA, 21 nt, RNAi-sense strand
agagcuuccgcggugucauuu

SEQ ID NO: 11202 - RNA, 21 nt, RNAi-antisense strand
augacaccgcggaagcucuuu

SEQ ID NO: 11203 - DNA, 21 bp, Homo sapiens
cagtccaacctggtgctggtc

SEQ ID NO: 11204 - RNA, 21 nt, RNAi-sense strand
guccaaccuggugcuggucuu

SEQ ID NO: 11205 - RNA, 21 nt, RNAi-antisense strand
gaccagcaccagguuggacuu

SEQ ID NO: 11206 - DNA, 21 bp, Homo sapiens
caggtactgcataggactcaa

SEQ ID NO: 11207 - RNA, 21 nt, RNAi-sense strand
gguacugcauaggacucaauu

SEQ ID NO: 11208 - RNA, 21 nt, RNAi-antisense strand
uugaguccuaugcaguaccuu

SEQ ID NO: 11209 - DNA, 21 bp, Homo sapiens
cactgcgctgtcagcgatagc

SEQ ID NO: 11210 - RNA, 21 nt, RNAi-sense strand
cugcgcugucagcgauagcuu

SEQ ID NO: 11211 - RNA, 21 nt, RNAi-antisense strand
gcuaucgcugacagcgcaguu

SEQ ID NO: 11212 - DNA, 21 bp, Homo sapiens
cagtggatggccattccagac

SEQ ID NO: 11213 - RNA, 21 nt, RNAi-sense strand
guggauggccauuccagacuu

SEQ ID NO: 11214 - RNA, 21 nt, RNAi-antisense strand
gucuggaauggccauccacuu

SEQ ID NO: 11215 - DNA, 21 bp, Homo sapiens
cattccagaccatgctcgaca

SEQ ID NO: 11216 - RNA, 21 nt, RNAi-sense strand
uuccagaccaugcucgacauu

SEQ ID NO: 11217 - RNA, 21 nt, RNAi-antisense strand
ugucgagcauggucuggaauu

SEQ ID NO: 11218 - DNA, 21 bp, Homo sapiens
cagaccatgctcgacagctga

SEQ ID NO: 11219 - RNA, 21 nt, RNAi-sense strand
gaccaugcucgacagcugauu

SEQ ID NO: 11220 - RNA, 21 nt, RNAi-antisense strand
ucagcugucgagcauggucuu

SEQ ID NO: 11221 - DNA, 21 bp, Homo sapiens
catgctcgacagctgaccaag

SEQ ID NO: 11222 - RNA, 21 nt, RNAi-sense strand
ugcucgacagcugaccaaguu

SEQ ID NO: 11223 - RNA, 21 nt, RNAi-antisense strand
cuuggucagcugucgagcauu

SEQ ID NO: 11224 - DNA, 21 bp, Homo sapiens
cagctgaccaaggccatgatg

SEQ ID NO: 11225 - RNA, 21 nt, RNAi-sense strand
gcugaccaaggccaugauguu

SEQ ID NO: 11226 - RNA, 21 nt, RNAi-antisense strand
caucauggccuuggucagcuu

SEQ ID NO: 11227 - DNA, 21 bp, Homo sapiens
caaggccatgatgcgaaaggc

SEQ ID NO: 11228 - RNA, 21 nt, RNAi-sense strand
aggccaugaugcgaaaggcuu

SEQ ID NO: 11229 - RNA, 21 nt, RNAi-antisense strand
gccuuucgcaucauggccuuu

SEQ ID NO: 11230 - DNA, 21 bp, Homo sapiens
catgatgcgaaaggccacggc

SEQ ID NO: 11231 - RNA, 21 nt, RNAi-sense strand
ugaugcgaaaggccacggcuu

SEQ ID NO: 11232 - RNA, 21 nt, RNAi-antisense strand
gccguggccuuucgcaucauu

SEQ ID NO: 11233 - DNA, 21 bp, Homo sapiens
cagaacttcgtcagcttcatc

SEQ ID NO: 11234 - RNA, 21 nt, RNAi-sense strand
gaacuucgucagcuucaucuu

SEQ ID NO: 11235 - RNA, 21 nt, RNAi-antisense strand
gaugaagcugacgaaguucuu

SEQ ID NO: 11236 - DNA, 21 bp, Homo sapiens
cagcttcatctccaaagactc

SEQ ID NO: 11237 - RNA, 21 nt, RNAi-sense strand
gcuucaucuccaaagacucuu

SEQ ID NO: 11238 - RNA, 21 nt, RNAi-antisense strand
gagucuuuggagaugaagcuu

SEQ ID NO: 11239 - DNA, 21 bp, Homo sapiens
catctccaaagactccatcca

SEQ ID NO: 11240 - RNA, 21 nt, RNAi-sense strand
ucuccaaagacuccauccauu

SEQ ID NO: 11241 - RNA, 21 nt, RNAi-antisense strand
uggauggagucuuuggagauu

SEQ ID NO: 11242 - DNA, 21 bp, Homo sapiens
caaagactccatccagaagtc

SEQ ID NO: 11243 - RNA, 21 nt, RNAi-sense strand
aagacuccauccagaagucuu

SEQ ID NO: 11244 - RNA, 21 nt, RNAi-antisense strand
gacuucuggauggagucuuuu

SEQ ID NO: 11245 - DNA, 21 bp, Homo sapiens
cagatgtacttagagaggctc

SEQ ID NO: 11246 - RNA, 21 nt, RNAi-sense strand
gauguacuuagagaggcucuu

SEQ ID NO: 11247 - RNA, 21 nt, RNAi-antisense strand
gagccucucuaaguacaucuu

SEQ ID NO: 11248 - DNA, 21 bp, Homo sapiens
cacaggcttacggccacacgt

SEQ ID NO: 11249 - RNA, 21 nt, RNAi-sense strand
caggcuuacggccacacguuu

SEQ ID NO: 11250 - RNA, 21 nt, RNAi-antisense strand
acguguggccguaagccuguu

SEQ ID NO: 11251 - DNA, 21 bp, Homo sapiens
gatggcgctggtggcttctgt

SEQ ID NO: 11252 - RNA, 21 nt, RNAi-sense strand
uggcgcugguggcuucuguuu

SEQ ID NO: 11253 - RNA, 21 nt, RNAi-antisense strand
acagaagccaccagcgccauu

SEQ ID NO: 11254 - DNA, 21 bp, Homo sapiens
gaacagcctgagcctggagtt

SEQ ID NO: 11255 - RNA, 21 nt, RNAi-sense strand
acagccugagccuggaguuuu

SEQ ID NO: 11256 - RNA, 21 nt, RNAi-antisense strand
aacuccaggcucaggcuguuu

SEQ ID NO: 11257 - DNA, 21 bp, Homo sapiens
gagcctggagtttctgacgga

SEQ ID NO: 11258 - RNA, 21 nt, RNAi-sense strand
gccuggaguuucugacggauu

SEQ ID NO: 11259 - RNA, 21 nt, RNAi-antisense strand
uccgucagaaacuccaggcuu

SEQ ID NO: 11260 - DNA, 21 bp, Homo sapiens
gagtttctgacggagctggtc

SEQ ID NO: 11261 - RNA, 21 nt, RNAi-sense strand
guuucugacggagcuggucuu

SEQ ID NO: 11262 - RNA, 21 nt, RNAi-antisense strand
gaccagcuccgucagaaacuu

SEQ ID NO: 11263 - DNA, 21 bp, Homo sapiens
gacggagctggtcatcagcct

SEQ ID NO: 11264 - RNA, 21 nt, RNAi-sense strand
cggagcuggucaucagccuuu

SEQ ID NO: 11265 - RNA, 21 nt, RNAi-antisense strand
aggcugaugaccagcuccguu

SEQ ID NO: 11266 - DNA, 21 bp, Homo sapiens
gagctggtcatcagcctggag

SEQ ID NO: 11267 - RNA, 21 nt, RNAi-sense strand
gcuggucaucagccuggaguu

SEQ ID NO: 11268 - RNA, 21 nt, RNAi-antisense strand
cuccaggcugaugaccagcuu

SEQ ID NO: 11269 - DNA, 21 bp, Homo sapiens
gagaagctggagaatgacaag

SEQ ID NO: 11270 - RNA, 21 nt, RNAi-sense strand
gaagcuggagaaugacaaguu

SEQ ID NO: 11271 - RNA, 21 nt, RNAi-antisense strand
cuugucauucuccagcuucuu

SEQ ID NO: 11272 - DNA, 21 bp, Homo sapiens
gaagctggagaatgacaagag

SEQ ID NO: 11273 - RNA, 21 nt, RNAi-sense strand
agcuggagaaugacaagaguu

SEQ ID NO: 11274 - RNA, 21 nt, RNAi-antisense strand
cucuugucauucuccagcuuu

SEQ ID NO: 11275 - DNA, 21 bp, Homo sapiens
gagaatgacaagagcttccgc

SEQ ID NO: 11276 - RNA, 21 nt, RNAi-sense strand
gaaugacaagagcuuccgcuu

SEQ ID NO: 11277 - RNA, 21 nt, RNAi-antisense strand
gcggaagcucuugucauucuu

SEQ ID NO: 11278 - DNA, 21 bp, Homo sapiens
gaatgacaagagcttccgcgg

SEQ ID NO: 11279 - RNA, 21 nt, RNAi-sense strand
augacaagagcuuccgcgguu

SEQ ID NO: 11280 - RNA, 21 nt, RNAi-antisense strand
ccgcggaagcucuugucauuu

SEQ ID NO: 11281 - DNA, 21 bp, Homo sapiens
gacaagagcttccgcggtgtc

SEQ ID NO: 11282 - RNA, 21 nt, RNAi-sense strand
caagagcuuccgcggugucuu

SEQ ID NO: 11283 - RNA, 21 nt, RNAi-antisense strand
gacaccgcggaagcucuuguu

SEQ ID NO: 11284 - DNA, 21 bp, Homo sapiens
gagcttccgcggtgtcattct

SEQ ID NO: 11285 - RNA, 21 nt, RNAi-sense strand
gcuuccgcggugucauucuuu

SEQ ID NO: 11286 - RNA, 21 nt, RNAi-antisense strand
agaaugacaccgcggaagcuu

SEQ ID NO: 11287 - DNA, 21 bp, Homo sapiens
gaaggccgttcaggagctgtg

SEQ ID NO: 11288 - RNA, 21 nt, RNAi-sense strand
aggccguucaggagcuguguu

SEQ ID NO: 11289 - RNA, 21 nt, RNAi-antisense strand
cacagcuccugaacggccuuu

SEQ ID NO: 11290 - DNA, 21 bp, Homo sapiens
gagctgtggctgcggttgtac

SEQ ID NO: 11291 - RNA, 21 nt, RNAi-sense strand
gcuguggcugcgguuguacuu

SEQ ID NO: 11292 - RNA, 21 nt, RNAi-antisense strand
guacaaccgcagccacagcuu

SEQ ID NO: 11293 - DNA, 21 bp, Homo sapiens
gacctgtgactaccgcatcct

SEQ ID NO: 11294 - RNA, 21 nt, RNAi-sense strand
ccugugacuaccgcauccuuu

SEQ ID NO: 11295 - RNA, 21 nt, RNAi-antisense strand
aggaugcgguagucacagguu

SEQ ID NO: 11296 - DNA, 21 bp, Homo sapiens
gaggagcaggtgcagagcact

SEQ ID NO: 11297 - RNA, 21 nt, RNAi-sense strand
ggagcaggugcagagcacuuu

SEQ ID NO: 11298 - RNA, 21 nt, RNAi-antisense strand
agugcucugcaccugcuccuu

SEQ ID NO: 11299 - DNA, 21 bp, Homo sapiens
gagcactgcgctgtcagcgat

SEQ ID NO: 11300 - RNA, 21 nt, RNAi-sense strand
gcacugcgcugucagcgauuu

SEQ ID NO: 11301 - RNA, 21 nt, RNAi-antisense strand
aucgcugacagcgcagugcuu

SEQ ID NO: 11302 - DNA, 21 bp, Homo sapiens
gatggccattccagaccatgc

SEQ ID NO: 11303 - RNA, 21 nt, RNAi-sense strand
uggccauuccagaccaugcuu

SEQ ID NO: 11304 - RNA, 21 nt, RNAi-antisense strand
gcauggucuggaauggccauu

SEQ ID NO: 11305 - DNA, 21 bp, Homo sapiens
gaccatgctcgacagctgacc

SEQ ID NO: 11306 - RNA, 21 nt, RNAi-sense strand
ccaugcucgacagcugaccuu

SEQ ID NO: 11307 - RNA, 21 nt, RNAi-antisense strand
ggucagcugucgagcaugguu

SEQ ID NO: 11308 - DNA, 21 bp, Homo sapiens
gacagctgaccaaggccatga

SEQ ID NO: 11309 - RNA, 21 nt, RNAi-sense strand
cagcugaccaaggccaugauu

SEQ ID NO: 11310 - RNA, 21 nt, RNAi-antisense strand
ucauggccuuggucagcuguu

SEQ ID NO: 11311 - DNA, 21 bp, Homo sapiens
gaccaaggccatgatgcgaaa

SEQ ID NO: 11312 - RNA, 21 nt, RNAi-sense strand
ccaaggccaugaugcgaaauu

SEQ ID NO: 11313 - RNA, 21 nt, RNAi-antisense strand
uuucgcaucauggccuugguu

SEQ ID NO: 11314 - DNA, 21 bp, Homo sapiens
gatgcggacgtgcagaacttc

SEQ ID NO: 11315 - RNA, 21 nt, RNAi-sense strand
ugcggacgugcagaacuucuu

SEQ ID NO: 11316 - RNA, 21 nt, RNAi-antisense strand
gaaguucugcacguccgcauu

SEQ ID NO: 11317 - DNA, 21 bp, Homo sapiens
gacgtgcagaacttcgtcagc

SEQ ID NO: 11318 - RNA, 21 nt, RNAi-sense strand
cgugcagaacuucgucagcuu

SEQ ID NO: 11319 - RNA, 21 nt, RNAi-antisense strand
gcugacgaaguucugcacguu

SEQ ID NO: 11320 - DNA, 21 bp, Homo sapiens
gaacttcgtcagcttcatctc

SEQ ID NO: 11321 - RNA, 21 nt, RNAi-sense strand
acuucgucagcuucaucucuu

SEQ ID NO: 11322 - RNA, 21 nt, RNAi-antisense strand
gagaugaagcugacgaaguuu

SEQ ID NO: 11323 - DNA, 21 bp, Homo sapiens
gatgtacttagagaggctcaa

SEQ ID NO: 11324 - RNA, 21 nt, RNAi-sense strand
uguacuuagagaggcucaauu

SEQ ID NO: 11325 - RNA, 21 nt, RNAi-antisense strand
uugagccucucuaaguacauu

SEQ ID NO: 11326 - DNA, 21 bp, Homo sapiens
gaggtcttaaacaaggtattt

SEQ ID NO: 11327 - RNA, 21 nt, RNAi-sense strand
ggucuuaaacaagguauuuuu

SEQ ID NO: 11328 - RNA, 21 nt, RNAi-antisense strand
aaauaccuuguuuaagaccuu

SEQ ID NO: 11329 - DNA, 21 bp, Homo sapiens
tactggaaggccgttcaggag

SEQ ID NO: 11330 - RNA, 21 nt, RNAi-sense strand
cuggaaggccguucaggaguu

SEQ ID NO: 11331 - RNA, 21 nt, RNAi-antisense strand
cuccugaacggccuuccaguu

SEQ ID NO: 11332 - DNA, 21 bp, Homo sapiens
taccagtccaacctggtgctg

SEQ ID NO: 11333 - RNA, 21 nt, RNAi-sense strand
ccaguccaaccuggugcuguu

SEQ ID NO: 11334 - RNA, 21 nt, RNAi-antisense strand
cagcaccagguuggacugguu

SEQ ID NO: 11335 - DNA, 21 bp, Homo sapiens
taccgcatcctggcggacaac

SEQ ID NO: 11336 - RNA, 21 nt, RNAi-sense strand
ccgcauccuggcggacaacuu

SEQ ID NO: 11337 - RNA, 21 nt, RNAi-antisense strand
guuguccgccaggaugcgguu

SEQ ID NO: 11338 - DNA, 21 bp, Homo sapiens
tactgcataggactcaatgag

SEQ ID NO: 11339 - RNA, 21 nt, RNAi-sense strand
cugcauaggacucaaugaguu

SEQ ID NO: 11340 - RNA, 21 nt, RNAi-antisense strand
cucauugaguccuaugcaguu

SEQ ID NO: 11341 - DNA, 21 bp, Homo sapiens
tacttagagaggctcaaagaa

SEQ ID NO: 11342 - RNA, 21 nt, RNAi-sense strand
cuuagagaggcucaaagaauu

SEQ ID NO: 11343 - RNA, 21 nt, RNAi-antisense strand
uucuuugagccucucuaaguu

SEQ ID NO: 11344 - DNA, 21 bp, Homo sapiens
tagagaggctcaaagaagaaa

SEQ ID NO: 11345 - RNA, 21 nt, RNAi-sense strand
gagaggcucaaagaagaaauu

SEQ ID NO: 11346 - RNA, 21 nt, RNAi-antisense strand
uuucuucuuugagccucucuu

SEQ ID NO: 11347 - DNA, 21 bp, Homo sapiens
cattccagaccatgctcgaca

SEQ ID NO: 11348 - RNA, 21 nt, RNAi-sense strand
uuccagaccaugcucgacauu

SEQ ID NO: 11349 - RNA, 21 nt, RNAi-antisense strand
ugucgagcauggucuggaauu

SEQ ID NO: 11350 - DNA, 21 bp, Homo sapiens
aaggattgcgaagaactggtc

SEQ ID NO: 11351 - RNA, 21 nt, RNAi-sense strand
ggauugcgaagaacuggucuu

SEQ ID NO: 11352 - RNA, 21 nt, RNAi-antisense strand
gaccaguucuucgcaauccuu

SEQ ID NO: 11353 - DNA, 21 bp, Homo sapiens
aagaactggtcgcaaatcctc

SEQ ID NO: 11354 - RNA, 21 nt, RNAi-sense strand
gaacuggucgcaaauccucuu

SEQ ID NO: 11355 - RNA, 21 nt, RNAi-antisense strand
gaggauuugcgaccaguucuu

SEQ ID NO: 11356 - DNA, 21 bp, Homo sapiens
aactggtcgcaaatcctccta

SEQ ID NO: 11357 - RNA, 21 nt, RNAi-sense strand
cuggucgcaaauccuccuauu

SEQ ID NO: 11358 - RNA, 21 nt, RNAi-antisense strand
uaggaggauuugcgaccaguu

SEQ ID NO: 11359 - DNA, 21 bp, Homo sapiens
aaatcctcctaagccaccagc

SEQ ID NO: 11360 - RNA, 21 nt, RNAi-sense strand
auccuccuaagccaccagcuu

SEQ ID NO: 11361 - RNA, 21 nt, RNAi-antisense strand
gcugguggcuuaggaggauuu

SEQ ID NO: 11362 - DNA, 21 bp, Homo sapiens
aatcctcctaagccaccagca

SEQ ID NO: 11363 - RNA, 21 nt, RNAi-sense strand
uccuccuaagccaccagcauu

SEQ ID NO: 11364 - RNA, 21 nt, RNAi-antisense strand
ugcugguggcuuaggaggauu

SEQ ID NO: 11365 - DNA, 21 bp, Homo sapiens
aagccaccagcatctcggtct

SEQ ID NO: 11366 - RNA, 21 nt, RNAi-sense strand
gccaccagcaucucggucuuu

SEQ ID NO: 11367 - RNA, 21 nt, RNAi-antisense strand
agaccgagaugcugguggcuu

SEQ ID NO: 11368 - DNA, 21 bp, Homo sapiens
aaggagatcctggaggagctg

SEQ ID NO: 11369 - RNA, 21 nt, RNAi-sense strand
ggagauccuggaggagcuguu

SEQ ID NO: 11370 - RNA, 21 nt, RNAi-antisense strand
cagcuccuccaggaucuccuu

SEQ ID NO: 11371 - DNA, 21 bp, Homo sapiens
aacaccaagttctcggaggag

SEQ ID NO: 11372 - RNA, 21 nt, RNAi-sense strand
caccaaguucucggaggaguu

SEQ ID NO: 11373 - RNA, 21 nt, RNAi-antisense strand
cuccuccgagaacuugguguu

SEQ ID NO: 11374 - DNA, 21 bp, Homo sapiens
aagttctcggaggaggagctg

SEQ ID NO: 11375 - RNA, 21 nt, RNAi-sense strand
guucucggaggaggagcuguu

SEQ ID NO: 11376 - RNA, 21 nt, RNAi-antisense strand
cagcuccuccuccgagaacuu

SEQ ID NO: 11377 - DNA, 21 bp, Homo sapiens
aagaccaaccagaagctggag

SEQ ID NO: 11378 - RNA, 21 nt, RNAi-sense strand
gaccaaccagaagcuggaguu

SEQ ID NO: 11379 - RNA, 21 nt, RNAi-antisense strand
cuccagcuucugguuggucuu

SEQ ID NO: 11380 - DNA, 21 bp, Homo sapiens
aagaatgaagtgctggagatc

SEQ ID NO: 11381 - RNA, 21 nt, RNAi-sense strand
gaaugaagugcuggagaucuu

SEQ ID NO: 11382 - RNA, 21 nt, RNAi-antisense strand
gaucuccagcacuucauucuu

SEQ ID NO: 11383 - DNA, 21 bp, Homo sapiens
aatgaagtgctggagatcgtc

SEQ ID NO: 11384 - RNA, 21 nt, RNAi-sense strand
ugaagugcuggagaucgucuu

SEQ ID NO: 11385 - RNA, 21 nt, RNAi-antisense strand
gacgaucuccagcacuucauu

SEQ ID NO: 11386 - DNA, 21 bp, Homo sapiens
aagtgctggagatcgtcatgg

SEQ ID NO: 11387 - RNA, 21 nt, RNAi-sense strand
gugcuggagaucgucaugguu

SEQ ID NO: 11388 - RNA, 21 nt, RNAi-antisense strand
ccaugacgaucuccagcacuu

SEQ ID NO: 11389 - DNA, 21 bp, Homo sapiens
aagctccttccagacgatgaa

SEQ ID NO: 11390 - RNA, 21 nt, RNAi-sense strand
gcuccuuccagacgaugaauu

SEQ ID NO: 11391 - RNA, 21 nt, RNAi-antisense strand
uucaucgucuggaaggagcuu

SEQ ID NO: 11392 - DNA, 21 bp, Homo sapiens
aaagcgagccgagaagatctg

SEQ ID NO: 11393 - RNA, 21 nt, RNAi-sense strand
agcgagccgagaagaucuguu

SEQ ID NO: 11394 - RNA, 21 nt, RNAi-antisense strand
cagaucuucucggcucgcuuu

SEQ ID NO: 11395 - DNA, 21 bp, Homo sapiens
aagcgagccgagaagatctgg

SEQ ID NO: 11396 - RNA, 21 nt, RNAi-sense strand
gcgagccgagaagaucugguu

SEQ ID NO: 11397 - RNA, 21 nt, RNAi-antisense strand
ccagaucuucucggcucgcuu

SEQ ID NO: 11398 - DNA, 21 bp, Homo sapiens
aagatctggaagtactttgga

SEQ ID NO: 11399 - RNA, 21 nt, RNAi-sense strand
gaucuggaaguacuuuggauu

SEQ ID NO: 11400 - RNA, 21 nt, RNAi-antisense strand
uccaaaguacuuccagaucuu

SEQ ID NO: 11401 - DNA, 21 bp, Homo sapiens
aataaggaaattctgcgactg

SEQ ID NO: 11402 - RNA, 21 nt, RNAi-sense strand
uaaggaaauucugcgacuguu

SEQ ID NO: 11403 - RNA, 21 nt, RNAi-antisense strand
cagucgcagaauuuccuuauu

SEQ ID NO: 11404 - DNA, 21 bp, Homo sapiens
aaggaaattctgcgactgatc

SEQ ID NO: 11405 - RNA, 21 nt, RNAi-sense strand
ggaaauucugcgacugaucuu

SEQ ID NO: 11406 - RNA, 21 nt, RNAi-antisense strand
gaucagucgcagaauuuccuu

SEQ ID NO: 11407 - DNA, 21 bp, Homo sapiens
aaattctgcgactgatccagt

SEQ ID NO: 11408 - RNA, 21 nt, RNAi-sense strand
auucugcgacugauccaguuu

SEQ ID NO: 11409 - RNA, 21 nt, RNAi-antisense strand
acuggaucagucgcagaauuu

SEQ ID NO: 11410 - DNA, 21 bp, Homo sapiens
aattctgcgactgatccagtt

SEQ ID NO: 11411 - RNA, 21 nt, RNAi-sense strand
uucugcgacugauccaguuuu

SEQ ID NO: 11412 - RNA, 21 nt, RNAi-antisense strand
aacuggaucagucgcagaauu

SEQ ID NO: 11413 - DNA, 21 bp, Homo sapiens
aaagatgaagaacgcctgatg

SEQ ID NO: 11414 - RNA, 21 nt, RNAi-sense strand
agaugaagaacgccugauguu

SEQ ID NO: 11415 - RNA, 21 nt, RNAi-antisense strand
caucaggcguucuucaucuuu

SEQ ID NO: 11416 - DNA, 21 bp, Homo sapiens
aagatgaagaacgcctgatgc

SEQ ID NO: 11417 - RNA, 21 nt, RNAi-sense strand
gaugaagaacgccugaugcuu

SEQ ID NO: 11418 - RNA, 21 nt, RNAi-antisense strand
gcaucaggcguucuucaucuu

SEQ ID NO: 11419 - DNA, 21 bp, Homo sapiens
aagaacgcctgatgccaactg

SEQ ID NO: 11420 - RNA, 21 nt, RNAi-sense strand
gaacgccugaugccaacuguu

SEQ ID NO: 11421 - RNA, 21 nt, RNAi-antisense strand
caguuggcaucaggcguucuu

SEQ ID NO: 11422 - DNA, 21 bp, Homo sapiens
aacgcctgatgccaactgttc

SEQ ID NO: 11423 - RNA, 21 nt, RNAi-sense strand
cgccugaugccaacuguucuu

SEQ ID NO: 11424 - RNA, 21 nt, RNAi-antisense strand
gaacaguuggcaucaggcguu

SEQ ID NO: 11425 - DNA, 21 bp, Homo sapiens
aagagaaaggcctgcacacaa

SEQ ID NO: 11426 - RNA, 21 nt, RNAi-sense strand
gagaaaggccugcacacaauu

SEQ ID NO: 11427 - RNA, 21 nt, RNAi-antisense strand
uugugugcaggccuuucucuu

SEQ ID NO: 11428 - DNA, 21 bp, Homo sapiens
aaactgaagcatctgtagtga

SEQ ID NO: 11429 - RNA, 21 nt, RNAi-sense strand
acugaagcaucuguagugauu

SEQ ID NO: 11430 - RNA, 21 nt, RNAi-antisense strand
ucacuacagaugcuucaguuu

SEQ ID NO: 11431 - DNA, 21 bp, Homo sapiens
aactgaagcatctgtagtgac

SEQ ID NO: 11432 - RNA, 21 nt, RNAi-sense strand
cugaagcaucuguagugacuu

SEQ ID NO: 11433 - RNA, 21 nt, RNAi-antisense strand
gucacuacagaugcuucaguu

SEQ ID NO: 11434 - DNA, 21 bp, Homo sapiens
aagctcctttgtggagtgctg

SEQ ID NO: 11435 - RNA, 21 nt, RNAi-sense strand
gcuccuuuguggagugcuguu

SEQ ID NO: 11436 - RNA, 21 nt, RNAi-antisense strand
cagcacuccacaaaggagcuu

SEQ ID NO: 11437 - DNA, 21 bp, Homo sapiens
aagcagtttccaataaacgca

SEQ ID NO: 11438 - RNA, 21 nt, RNAi-sense strand
gcaguuuccaauaaacgcauu

SEQ ID NO: 11439 - RNA, 21 nt, RNAi-antisense strand
ugcguuuauuggaaacugcuu

SEQ ID NO: 11440 - DNA, 21 bp, Homo sapiens
aataaacgcaagctgagctgg

SEQ ID NO: 11441 - RNA, 21 nt, RNAi-sense strand
uaaacgcaagcugagcugguu

SEQ ID NO: 11442 - RNA, 21 nt, RNAi-antisense strand
ccagcucagcuugcguuuauu

SEQ ID NO: 11443 - DNA, 21 bp, Homo sapiens
aaacgcaagctgagctggaaa

SEQ ID NO: 11444 - RNA, 21 nt, RNAi-sense strand
acgcaagcugagcuggaaauu

SEQ ID NO: 11445 - RNA, 21 nt, RNAi-antisense strand
uuuccagcucagcuugcguuu

SEQ ID NO: 11446 - DNA, 21 bp, Homo sapiens
caaggattgcgaagaactggt

SEQ ID NO: 11447 - RNA, 21 nt, RNAi-sense strand
aggauugcgaagaacugguuu

SEQ ID NO: 11448 - RNA, 21 nt, RNAi-antisense strand
accaguucuucgcaauccuuu

SEQ ID NO: 11449 - DNA, 21 bp, Homo sapiens
caaatcctcctaagccaccag

SEQ ID NO: 11450 - RNA, 21 nt, RNAi-sense strand
aauccuccuaagccaccaguu

SEQ ID NO: 11451 - RNA, 21 nt, RNAi-antisense strand
cugguggcuuaggaggauuuu

SEQ ID NO: 11452 - DNA, 21 bp, Homo sapiens
caccagcatctcggtcttcag

SEQ ID NO: 11453 - RNA, 21 nt, RNAi-sense strand
ccagcaucucggucuucaguu

SEQ ID NO: 11454 - RNA, 21 nt, RNAi-antisense strand
cugaagaccgagaugcugguu

SEQ ID NO: 11455 - DNA, 21 bp, Homo sapiens
cagcatctcggtcttcagctc

SEQ ID NO: 11456 - RNA, 21 nt, RNAi-sense strand
gcaucucggucuucagcucuu

SEQ ID NO: 11457 - RNA, 21 nt, RNAi-antisense strand
gagcugaagaccgagaugcuu

SEQ ID NO: 11458 - DNA, 21 bp, Homo sapiens
catctcggtcttcagctcaca

SEQ ID NO: 11459 - RNA, 21 nt, RNAi-sense strand
ucucggucuucagcucacauu

SEQ ID NO: 11460 - RNA, 21 nt, RNAi-antisense strand
ugugagcugaagaccgagauu

SEQ ID NO: 11461 - DNA, 21 bp, Homo sapiens
cagctcacaccagccttgagc

SEQ ID NO: 11462 - RNA, 21 nt, RNAi-sense strand
gcucacaccagccuugagcuu

SEQ ID NO: 11463 - RNA, 21 nt, RNAi-antisense strand
gcucaaggcuggugugagcuu

SEQ ID NO: 11464 - DNA, 21 bp, Homo sapiens
caaggagatcctggaggagct

SEQ ID NO: 11465 - RNA, 21 nt, RNAi-sense strand
aggagauccuggaggagcuuu

SEQ ID NO: 11466 - RNA, 21 nt, RNAi-antisense strand
agcuccuccaggaucuccuuu

SEQ ID NO: 11467 - DNA, 21 bp, Homo sapiens
cagctgaacaccaagttctcg

SEQ ID NO: 11468 - RNA, 21 nt, RNAi-sense strand
gcugaacaccaaguucucguu

SEQ ID NO: 11469 - RNA, 21 nt, RNAi-antisense strand
cgagaacuugguguucagcuu

SEQ ID NO: 11470 - DNA, 21 bp, Homo sapiens
caccaagttctcggaggagga

SEQ ID NO: 11471 - RNA, 21 nt, RNAi-sense strand
ccaaguucucggaggaggauu

SEQ ID NO: 11472 - RNA, 21 nt, RNAi-antisense strand
uccuccuccgagaacuugguu

SEQ ID NO: 11473 - DNA, 21 bp, Homo sapiens
caagttctcggaggaggagct

SEQ ID NO: 11474 - RNA, 21 nt, RNAi-sense strand
aguucucggaggaggagcuuu

SEQ ID NO: 11475 - RNA, 21 nt, RNAi-antisense strand
agcuccuccuccgagaacuuu

SEQ ID NO: 11476 - DNA, 21 bp, Homo sapiens
cagtccttcctgaaggactgt

SEQ ID NO: 11477 - RNA, 21 nt, RNAi-sense strand
guccuuccugaaggacuguuu

SEQ ID NO: 11478 - RNA, 21 nt, RNAi-antisense strand
acaguccuucaggaaggacuu

SEQ ID NO: 11479 - DNA, 21 bp, Homo sapiens
cagcagcagttccagagcatc

SEQ ID NO: 11480 - RNA, 21 nt, RNAi-sense strand
gcagcaguuccagagcaucuu

SEQ ID NO: 11481 - RNA, 21 nt, RNAi-antisense strand
gaugcucuggaacugcugcuu

SEQ ID NO: 11482 - DNA, 21 bp, Homo sapiens
cagcagttccagagcatctac

SEQ ID NO: 11483 - RNA, 21 nt, RNAi-sense strand
gcaguuccagagcaucuacuu

SEQ ID NO: 11484 - RNA, 21 nt, RNAi-antisense strand
guagaugcucuggaacugcuu

SEQ ID NO: 11485 - DNA, 21 bp, Homo sapiens
cagttccagagcatctacgcc

SEQ ID NO: 11486 - RNA, 21 nt, RNAi-sense strand
guuccagagcaucuacgccuu

SEQ ID NO: 11487 - RNA, 21 nt, RNAi-antisense strand
ggcguagaugcucuggaacuu

SEQ ID NO: 11488 - DNA, 21 bp, Homo sapiens
cagagcatctacgccaagttc

SEQ ID NO: 11489 - RNA, 21 nt, RNAi-sense strand
gagcaucuacgccaaguucuu

SEQ ID NO: 11490 - RNA, 21 nt, RNAi-antisense strand
gaacuuggcguagaugcucuu

SEQ ID NO: 11491 - DNA, 21 bp, Homo sapiens
cagcatgtgttccgcagcttc

SEQ ID NO: 11492 - RNA, 21 nt, RNAi-sense strand
gcauguguuccgcagcuucuu

SEQ ID NO: 11493 - RNA, 21 nt, RNAi-antisense strand
gaagcugcggaacacaugcuu

SEQ ID NO: 11494 - DNA, 21 bp, Homo sapiens
catgtgttccgcagcttcgat

SEQ ID NO: 11495 - RNA, 21 nt, RNAi-sense strand
uguguuccgcagcuucgauuu

SEQ ID NO: 11496 - RNA, 21 nt, RNAi-antisense strand
aucgaagcugcggaacacauu

SEQ ID NO: 11497 - DNA, 21 bp, Homo sapiens
cagcttcgattccaacctcga

SEQ ID NO: 11498 - RNA, 21 nt, RNAi-sense strand
gcuucgauuccaaccucgauu

SEQ ID NO: 11499 - RNA, 21 nt, RNAi-antisense strand
ucgagguuggaaucgaagcuu

SEQ ID NO: 11500 - DNA, 21 bp, Homo sapiens
caagaccaaccagaagctgga

SEQ ID NO: 11501 - RNA, 21 nt, RNAi-sense strand
agaccaaccagaagcuggauu

SEQ ID NO: 11502 - RNA, 21 nt, RNAi-antisense strand
uccagcuucugguuggucuuu

SEQ ID NO: 11503 - DNA, 21 bp, Homo sapiens
catcagcaagaatgaagtgct

SEQ ID NO: 11504 - RNA, 21 nt, RNAi-sense strand
ucagcaagaaugaagugcuuu

SEQ ID NO: 11505 - RNA, 21 nt, RNAi-antisense strand
agcacuucauucuugcugauu

SEQ ID NO: 11506 - DNA, 21 bp, Homo sapiens
cagcaagaatgaagtgctgga

SEQ ID NO: 11507 - RNA, 21 nt, RNAi-sense strand
gcaagaaugaagugcuggauu

SEQ ID NO: 11508 - RNA, 21 nt, RNAi-antisense strand
uccagcacuucauucuugcuu

SEQ ID NO: 11509 - DNA, 21 bp, Homo sapiens
caagaatgaagtgctggagat

SEQ ID NO: 11510 - RNA, 21 nt, RNAi-sense strand
agaaugaagugcuggagauuu

SEQ ID NO: 11511 - RNA, 21 nt, RNAi-antisense strand
aucuccagcacuucauucuuu

SEQ ID NO: 11512 - DNA, 21 bp, Homo sapiens
cagagaaagaattcattgagg

SEQ ID NO: 11513 - RNA, 21 nt, RNAi-sense strand
gagaaagaauucauugagguu

SEQ ID NO: 11514 - RNA, 21 nt, RNAi-antisense strand
ccucaaugaauucuuucucuu

SEQ ID NO: 11515 - DNA, 21 bp, Homo sapiens
cactggccaataaggaaattc

SEQ ID NO: 11516 - RNA, 21 nt, RNAi-sense strand
cuggccaauaaggaaauucuu

SEQ ID NO: 11517 - RNA, 21 nt, RNAi-antisense strand
gaauuuccuuauuggccaguu

SEQ ID NO: 11518 - DNA, 21 bp, Homo sapiens
caataaggaaattctgcgact

SEQ ID NO: 11519 - RNA, 21 nt, RNAi-sense strand
auaaggaaauucugcgacuuu

SEQ ID NO: 11520 - RNA, 21 nt, RNAi-antisense strand
agucgcagaauuuccuuauuu

SEQ ID NO: 11521 - DNA, 21 bp, Homo sapiens
cacctaccactcacatgacac

SEQ ID NO: 11522 - RNA, 21 nt, RNAi-sense strand
ccuaccacucacaugacacuu

SEQ ID NO: 11523 - RNA, 21 nt, RNAi-antisense strand
gugucaugugagugguagguu

SEQ ID NO: 11524 - DNA, 21 bp, Homo sapiens
cacacacacacacatgcacac

SEQ ID NO: 11525 - RNA, 21 nt, RNAi-sense strand
cacacacacacaugcacacuu

SEQ ID NO: 11526 - RNA, 21 nt, RNAi-antisense strand
gugugcauguguguguguguu

SEQ ID NO: 11527 - DNA, 21 bp, Homo sapiens
cacacacacacatgcacacac

SEQ ID NO: 11528 - RNA, 21 nt, RNAi-sense strand
cacacacacaugcacacacuu

SEQ ID NO: 11529 - RNA, 21 nt, RNAi-antisense strand
gugugugcauguguguguguu

SEQ ID NO: 11530 - DNA, 21 bp, Homo sapiens
cacacacacatgcacacacac

SEQ ID NO: 11531 - RNA, 21 nt, RNAi-sense strand
cacacacaugcacacacacuu

SEQ ID NO: 11532 - RNA, 21 nt, RNAi-antisense strand
gugugugugcauguguguguu

SEQ ID NO: 11533 - DNA, 21 bp, Homo sapiens
cacacacatgcacacacacgc

SEQ ID NO: 11534 - RNA, 21 nt, RNAi-sense strand
cacacaugcacacacacgcuu

SEQ ID NO: 11535 - RNA, 21 nt, RNAi-antisense strand
gcgugugugugcauguguguu

SEQ ID NO: 11536 - DNA, 21 bp, Homo sapiens
cacacatgcacacacacgcgc

SEQ ID NO: 11537 - RNA, 21 nt, RNAi-sense strand
cacaugcacacacacgcgcuu

SEQ ID NO: 11538 - RNA, 21 nt, RNAi-antisense strand
gcgcgugugugugcauguguu

SEQ ID NO: 11539 - DNA, 21 bp, Homo sapiens
cacacacacacacacacatcc

SEQ ID NO: 11540 - RNA, 21 nt, RNAi-sense strand
cacacacacacacacauccuu

SEQ ID NO: 11541 - RNA, 21 nt, RNAi-antisense strand
ggauguguguguguguguguu

SEQ ID NO: 11542 - DNA, 21 bp, Homo sapiens
cacacacacacacacatccac

SEQ ID NO: 11543 - RNA, 21 nt, RNAi-sense strand
cacacacacacacauccacuu

SEQ ID NO: 11544 - RNA, 21 nt, RNAi-antisense strand
guggauguguguguguguguu

SEQ ID NO: 11545 - DNA, 21 bp, Homo sapiens
caagagaaaggcctgcacaca

SEQ ID NO: 11546 - RNA, 21 nt, RNAi-sense strand
agagaaaggccugcacacauu

SEQ ID NO: 11547 - RNA, 21 nt, RNAi-antisense strand
ugugugcaggccuuucucuuu

SEQ ID NO: 11548 - DNA, 21 bp, Homo sapiens
caaactgaagcatctgtagtg

SEQ ID NO: 11549 - RNA, 21 nt, RNAi-sense strand
aacugaagcaucuguaguguu

SEQ ID NO: 11550 - RNA, 21 nt, RNAi-antisense strand
cacuacagaugcuucaguuuu

SEQ ID NO: 11551 - DNA, 21 bp, Homo sapiens
caggattaggccataggagtc

SEQ ID NO: 11552 - RNA, 21 nt, RNAi-sense strand
ggauuaggccauaggagucuu

SEQ ID NO: 11553 - RNA, 21 nt, RNAi-antisense strand
gacuccuauggccuaauccuu

SEQ ID NO: 11554 - DNA, 21 bp, Homo sapiens
cataggagtcctaagtgtcac

SEQ ID NO: 11555 - RNA, 21 nt, RNAi-sense strand
uaggaguccuaagugucacuu

SEQ ID NO: 11556 - RNA, 21 nt, RNAi-antisense strand
gugacacuuaggacuccuauu

SEQ ID NO: 11557 - DNA, 21 bp, Homo sapiens
cagtttccaataaacgcaagc

SEQ ID NO: 11558 - RNA, 21 nt, RNAi-sense strand
guuuccaauaaacgcaagcuu

SEQ ID NO: 11559 - RNA, 21 nt, RNAi-antisense strand
gcuugcguuuauuggaaacuu

SEQ ID NO: 11560 - DNA, 21 bp, Homo sapiens
caataaacgcaagctgagctg

SEQ ID NO: 11561 - RNA, 21 nt, RNAi-sense strand
auaaacgcaagcugagcuguu

SEQ ID NO: 11562 - RNA, 21 nt, RNAi-antisense strand
cagcucagcuugcguuuauuu

SEQ ID NO: 11563 - DNA, 21 bp, Homo sapiens
gattgcgaagaactggtcgca

SEQ ID NO: 11564 - RNA, 21 nt, RNAi-sense strand
uugcgaagaacuggucgcauu

SEQ ID NO: 11565 - RNA, 21 nt, RNAi-antisense strand
ugcgaccaguucuucgcaauu

SEQ ID NO: 11566 - DNA, 21 bp, Homo sapiens
gaagaactggtcgcaaatcct

SEQ ID NO: 11567 - RNA, 21 nt, RNAi-sense strand
agaacuggucgcaaauccuuu

SEQ ID NO: 11568 - RNA, 21 nt, RNAi-antisense strand
aggauuugcgaccaguucuuu

SEQ ID NO: 11569 - DNA, 21 bp, Homo sapiens
gaactggtcgcaaatcctcct

SEQ ID NO: 11570 - RNA, 21 nt, RNAi-sense strand
acuggucgcaaauccuccuuu

SEQ ID NO: 11571 - RNA, 21 nt, RNAi-antisense strand
aggaggauuugcgaccaguuu

SEQ ID NO: 11572 - DNA, 21 bp, Homo sapiens
gagatcctggaggagctgcag

SEQ ID NO: 11573 - RNA, 21 nt, RNAi-sense strand
gauccuggaggagcugcaguu

SEQ ID NO: 11574 - RNA, 21 nt, RNAi-antisense strand
cugcagcuccuccaggaucuu

SEQ ID NO: 11575 - DNA, 21 bp, Homo sapiens
gatcctggaggagctgcagct

SEQ ID NO: 11576 - RNA, 21 nt, RNAi-sense strand
uccuggaggagcugcagcuuu

SEQ ID NO: 11577 - RNA, 21 nt, RNAi-antisense strand
agcugcagcuccuccaggauu

SEQ ID NO: 11578 - DNA, 21 bp, Homo sapiens
gaggagctgcagctgaacacc

SEQ ID NO: 11579 - RNA, 21 nt, RNAi-sense strand
ggagcugcagcugaacaccuu

SEQ ID NO: 11580 - RNA, 21 nt, RNAi-antisense strand
gguguucagcugcagcuccuu

SEQ ID NO: 11581 - DNA, 21 bp, Homo sapiens
gagctgcagctgaacaccaag

SEQ ID NO: 11582 - RNA, 21 nt, RNAi-sense strand
gcugcagcugaacaccaaguu

SEQ ID NO: 11583 - RNA, 21 nt, RNAi-antisense strand
cuugguguucagcugcagcuu

SEQ ID NO: 11584 - DNA, 21 bp, Homo sapiens
gaacaccaagttctcggagga

SEQ ID NO: 11585 - RNA, 21 nt, RNAi-sense strand
acaccaaguucucggaggauu

SEQ ID NO: 11586 - RNA, 21 nt, RNAi-antisense strand
uccuccgagaacuugguguuu

SEQ ID NO: 11587 - DNA, 21 bp, Homo sapiens
gaggagctgtgctcctggtac

SEQ ID NO: 11588 - RNA, 21 nt, RNAi-sense strand
ggagcugugcuccugguacuu

SEQ ID NO: 11589 - RNA, 21 nt, RNAi-antisense strand
guaccaggagcacagcuccuu

SEQ ID NO: 11590 - DNA, 21 bp, Homo sapiens
gagctgtgctcctggtaccag

SEQ ID NO: 11591 - RNA, 21 nt, RNAi-sense strand
gcugugcuccugguaccaguu

SEQ ID NO: 11592 - RNA, 21 nt, RNAi-antisense strand
cugguaccaggagcacagcuu

SEQ ID NO: 11593 - DNA, 21 bp, Homo sapiens
gagcatctacgccaagttctt

SEQ ID NO: 11594 - RNA, 21 nt, RNAi-sense strand
gcaucuacgccaaguucuuuu

SEQ ID NO: 11595 - RNA, 21 nt, RNAi-antisense strand
aagaacuuggcguagaugcuu

SEQ ID NO: 11596 - DNA, 21 bp, Homo sapiens
gattccaacctcgacggcacc

SEQ ID NO: 11597 - RNA, 21 nt, RNAi-sense strand
uuccaaccucgacggcaccuu

SEQ ID NO: 11598 - RNA, 21 nt, RNAi-antisense strand
ggugccgucgagguuggaauu

SEQ ID NO: 11599 - DNA, 21 bp, Homo sapiens
gacttcaaggagtacgtcatc

SEQ ID NO: 11600 - RNA, 21 nt, RNAi-sense strand
cuucaaggaguacgucaucuu

SEQ ID NO: 11601 - RNA, 21 nt, RNAi-antisense strand
gaugacguacuccuugaaguu

SEQ ID NO: 11602 - DNA, 21 bp, Homo sapiens
gaccaaccagaagctggagtg

SEQ ID NO: 11603 - RNA, 21 nt, RNAi-sense strand
ccaaccagaagcuggaguguu

SEQ ID NO: 11604 - RNA, 21 nt, RNAi-antisense strand
cacuccagcuucugguugguu

SEQ ID NO: 11605 - DNA, 21 bp, Homo sapiens
gaccatcagcaagaatgaagt

SEQ ID NO: 11606 - RNA, 21 nt, RNAi-sense strand
ccaucagcaagaaugaaguuu

SEQ ID NO: 11607 - RNA, 21 nt, RNAi-antisense strand
acuucauucuugcugaugguu

SEQ ID NO: 11608 - DNA, 21 bp, Homo sapiens
gaatgaagtgctggagatcgt

SEQ ID NO: 11609 - RNA, 21 nt, RNAi-sense strand
augaagugcuggagaucguuu

SEQ ID NO: 11610 - RNA, 21 nt, RNAi-antisense strand
acgaucuccagcacuucauuu

SEQ ID NO: 11611 - DNA, 21 bp, Homo sapiens
gaagtgctggagatcgtcatg

SEQ ID NO: 11612 - RNA, 21 nt, RNAi-sense strand
agugcuggagaucgucauguu

SEQ ID NO: 11613 - RNA, 21 nt, RNAi-antisense strand
caugacgaucuccagcacuuu

SEQ ID NO: 11614 - DNA, 21 bp, Homo sapiens
gaggacgtgaagctccttcca

SEQ ID NO: 11615 - RNA, 21 nt, RNAi-sense strand
ggacgugaagcuccuuccauu

SEQ ID NO: 11616 - RNA, 21 nt, RNAi-antisense strand
uggaaggagcuucacguccuu

SEQ ID NO: 11617 - DNA, 21 bp, Homo sapiens
gacgtgaagctccttccagac

SEQ ID NO: 11618 - RNA, 21 nt, RNAi-sense strand
cgugaagcuccuuccagacuu

SEQ ID NO: 11619 - RNA, 21 nt, RNAi-antisense strand
gucuggaaggagcuucacguu

SEQ ID NO: 11620 - DNA, 21 bp, Homo sapiens
gaagctccttccagacgatga

SEQ ID NO: 11621 - RNA, 21 nt, RNAi-sense strand
agcuccuuccagacgaugauu

SEQ ID NO: 11622 - RNA, 21 nt, RNAi-antisense strand
ucaucgucuggaaggagcuuu

SEQ ID NO: 11623 - DNA, 21 bp, Homo sapiens
gagccgagaagatctggaagt

SEQ ID NO: 11624 - RNA, 21 nt, RNAi-sense strand
gccgagaagaucuggaaguuu

SEQ ID NO: 11625 - RNA, 21 nt, RNAi-antisense strand
acuuccagaucuucucggcuu

SEQ ID NO: 11626 - DNA, 21 bp, Homo sapiens
gagaagatctggaagtacttt

SEQ ID NO: 11627 - RNA, 21 nt, RNAi-sense strand
gaagaucuggaaguacuuuuu

SEQ ID NO: 11628 - RNA, 21 nt, RNAi-antisense strand
aaaguacuuccagaucuucuu

SEQ ID NO: 11629 - DNA, 21 bp, Homo sapiens
gaagatctggaagtactttgg

SEQ ID NO: 11630 - RNA, 21 nt, RNAi-sense strand
agaucuggaaguacuuugguu

SEQ ID NO: 11631 - RNA, 21 nt, RNAi-antisense strand
ccaaaguacuuccagaucuuu

SEQ ID NO: 11632 - DNA, 21 bp, Homo sapiens
gatctggaagtactttggaaa

SEQ ID NO: 11633 - RNA, 21 nt, RNAi-sense strand
ucuggaaguacuuuggaaauu

SEQ ID NO: 11634 - RNA, 21 nt, RNAi-antisense strand
uuuccaaaguacuuccagauu

SEQ ID NO: 11635 - DNA, 21 bp, Homo sapiens
gaagtactttggaaagaatga

SEQ ID NO: 11636 - RNA, 21 nt, RNAi-sense strand
aguacuuuggaaagaaugauu

SEQ ID NO: 11637 - RNA, 21 nt, RNAi-antisense strand
ucauucuuuccaaaguacuuu

SEQ ID NO: 11638 - DNA, 21 bp, Homo sapiens
gatgatgataaacttacagag

SEQ ID NO: 11639 - RNA, 21 nt, RNAi-sense strand
ugaugauaaacuuacagaguu

SEQ ID NO: 11640 - RNA, 21 nt, RNAi-antisense strand
cucuguaaguuuaucaucauu

SEQ ID NO: 11641 - DNA, 21 bp, Homo sapiens
gacactggccaataaggaaat

SEQ ID NO: 11642 - RNA, 21 nt, RNAi-sense strand
cacuggccaauaaggaaauuu

SEQ ID NO: 11643 - RNA, 21 nt, RNAi-antisense strand
auuuccuuauuggccaguguu

SEQ ID NO: 11644 - DNA, 21 bp, Homo sapiens
gaaattctgcgactgatccag

SEQ ID NO: 11645 - RNA, 21 nt, RNAi-sense strand
aauucugcgacugauccaguu

SEQ ID NO: 11646 - RNA, 21 nt, RNAi-antisense strand
cuggaucagucgcagaauuuu

SEQ ID NO: 11647 - DNA, 21 bp, Homo sapiens
gactgatccagtttgagcctc

SEQ ID NO: 11648 - RNA, 21 nt, RNAi-sense strand
cugauccaguuugagccucuu

SEQ ID NO: 11649 - RNA, 21 nt, RNAi-antisense strand
gaggcucaaacuggaucaguu

SEQ ID NO: 11650 - DNA, 21 bp, Homo sapiens
gatgaagaacgcctgatgcca

SEQ ID NO: 11651 - RNA, 21 nt, RNAi-sense strand
ugaagaacgccugaugccauu

SEQ ID NO: 11652 - RNA, 21 nt, RNAi-antisense strand
uggcaucaggcguucuucauu

SEQ ID NO: 11653 - DNA, 21 bp, Homo sapiens
gaagaacgcctgatgccaact

SEQ ID NO: 11654 - RNA, 21 nt, RNAi-sense strand
agaacgccugaugccaacuuu

SEQ ID NO: 11655 - RNA, 21 nt, RNAi-antisense strand
aguuggcaucaggcguucuuu

SEQ ID NO: 11656 - DNA, 21 bp, Homo sapiens
gaacgcctgatgccaactgtt

SEQ ID NO: 11657 - RNA, 21 nt, RNAi-sense strand
acgccugaugccaacuguuuu

SEQ ID NO: 11658 - RNA, 21 nt, RNAi-antisense strand
aacaguuggcaucaggcguuu

SEQ ID NO: 11659 - DNA, 21 bp, Homo sapiens
gatgccaactgttcagctgtc

SEQ ID NO: 11660 - RNA, 21 nt, RNAi-sense strand
ugccaacuguucagcugucuu

SEQ ID NO: 11661 - RNA, 21 nt, RNAi-antisense strand
gacagcugaacaguuggcauu

SEQ ID NO: 11662 - DNA, 21 bp, Homo sapiens
gagcgcctgtgcacacacaca

SEQ ID NO: 11663 - RNA, 21 nt, RNAi-sense strand
gcgccugugcacacacacauu

SEQ ID NO: 11664 - RNA, 21 nt, RNAi-antisense strand
ugugugugugcacaggcgcuu

SEQ ID NO: 11665 - DNA, 21 bp, Homo sapiens
gagaaaggcctgcacacaagc

SEQ ID NO: 11666 - RNA, 21 nt, RNAi-sense strand
gaaaggccugcacacaagcuu

SEQ ID NO: 11667 - RNA, 21 nt, RNAi-antisense strand
gcuugugugcaggccuuucuu

SEQ ID NO: 11668 - DNA, 21 bp, Homo sapiens
gattaggccataggagtccta

SEQ ID NO: 11669 - RNA, 21 nt, RNAi-sense strand
uuaggccauaggaguccuauu

SEQ ID NO: 11670 - RNA, 21 nt, RNAi-antisense strand
uaggacuccuauggccuaauu

SEQ ID NO: 11671 - DNA, 21 bp, Homo sapiens
taagccaccagcatctcggtc

SEQ ID NO: 11672 - RNA, 21 nt, RNAi-sense strand
agccaccagcaucucggucuu

SEQ ID NO: 11673 - RNA, 21 nt, RNAi-antisense strand
gaccgagaugcugguggcuuu

SEQ ID NO: 11674 - DNA, 21 bp, Homo sapiens
taccagtccttcctgaaggac

SEQ ID NO: 11675 - RNA, 21 nt, RNAi-sense strand
ccaguccuuccugaaggacuu

SEQ ID NO: 11676 - RNA, 21 nt, RNAi-antisense strand
guccuucaggaaggacugguu

SEQ ID NO: 11677 - DNA, 21 bp, Homo sapiens
taaggaaattctgcgactgat

SEQ ID NO: 11678 - RNA, 21 nt, RNAi-sense strand
aggaaauucugcgacugauuu

SEQ ID NO: 11679 - RNA, 21 nt, RNAi-antisense strand
aucagucgcagaauuuccuuu

SEQ ID NO: 11680 - DNA, 21 bp, Homo sapiens
taggccataggagtcctaagt

SEQ ID NO: 11681 - RNA, 21 nt, RNAi-sense strand
ggccauaggaguccuaaguuu

SEQ ID NO: 11682 - RNA, 21 nt, RNAi-antisense strand
acuuaggacuccuauggccuu

SEQ ID NO: 11683 - DNA, 21 bp, Homo sapiens
taagctcctttgtggagtgct

SEQ ID NO: 11684 - RNA, 21 nt, RNAi-sense strand
agcuccuuuguggagugcuuu

SEQ ID NO: 11685 - RNA, 21 nt, RNAi-antisense strand
agcacuccacaaaggagcuuu

SEQ ID NO: 11686 - DNA, 21 bp, Homo sapiens
taagcagtttccaataaacgc

SEQ ID NO: 11687 - RNA, 21 nt, RNAi-sense strand
agcaguuuccaauaaacgcuu

SEQ ID NO: 11688 - RNA, 21 nt, RNAi-antisense strand
gcguuuauuggaaacugcuuu

SEQ ID NO: 11689 - DNA, 21 bp, Homo sapiens
taaacgcaagctgagctggaa

SEQ ID NO: 11690 - RNA, 21 nt, RNAi-sense strand
aacgcaagcugagcuggaauu

SEQ ID NO: 11691 - RNA, 21 nt, RNAi-antisense strand
uuccagcucagcuugcguuuu

SEQ ID NO: 11692 - DNA, 21 bp, Homo sapiens
aagctccttccagacgatgaa

SEQ ID NO: 11693 - RNA, 21 nt, RNAi-sense strand
gcuccuuccagacgaugaauu

SEQ ID NO: 11694 - RNA, 21 nt, RNAi-antisense strand
uucaucgucuggaaggagcuu

SEQ ID NO: 11695 - DNA, 21 bp, Homo sapiens
cagcagttccagagcatctac

SEQ ID NO: 11696 - RNA, 21 nt, RNAi-sense strand
gcaguuccagagcaucuacuu

SEQ ID NO: 11697 - RNA, 21 nt, RNAi-antisense strand
guagaugcucuggaacugcuu

SEQ ID NO: 11698 - DNA, 21 bp, Homo sapiens
cagagcatctacgccaagttc

SEQ ID NO: 11699 - RNA, 21 nt, RNAi-sense strand
gagcaucuacgccaaguucuu

SEQ ID NO: 11700 - RNA, 21 nt, RNAi-antisense strand
gaacuuggcguagaugcucuu

SEQ ID NO: 11701 - DNA, 21 bp, Homo sapiens
cagcttcgattccaacctcga

SEQ ID NO: 11702 - RNA, 21 nt, RNAi-sense strand
gcuucgauuccaaccucgauu

SEQ ID NO: 11703 - RNA, 21 nt, RNAi-antisense strand
ucgagguuggaaucgaagcuu

SEQ ID NO: 11704 - DNA, 21 bp, Homo sapiens
aagccacctcagtgcgtggac

SEQ ID NO: 11705 - RNA, 21 nt, RNAi-sense strand
gccaccucagugcguggacuu

SEQ ID NO: 11706 - RNA, 21 nt, RNAi-antisense strand
guccacgcacugagguggcuu

SEQ ID NO: 11707 - DNA, 21 bp, Homo sapiens
aacctgctggagcacgagacc

SEQ ID NO: 11708 - RNA, 21 nt, RNAi-sense strand
ccugcuggagcacgagaccuu

SEQ ID NO: 11709 - RNA, 21 nt, RNAi-antisense strand
ggucucgugcuccagcagguu

SEQ ID NO: 11710 - DNA, 21 bp, Homo sapiens
aatgccaccgaagcctccaag

SEQ ID NO: 11711 - RNA, 21 nt, RNAi-sense strand
ugccaccgaagccuccaaguu

SEQ ID NO: 11712 - RNA, 21 nt, RNAi-antisense strand
cuuggaggcuucgguggcauu

SEQ ID NO: 11713 - DNA, 21 bp, Homo sapiens
aaggcacaacggtgtgtcctc

SEQ ID NO: 11714 - RNA, 21 nt, RNAi-sense strand
ggcacaacgguguguccucuu

SEQ ID NO: 11715 - RNA, 21 nt, RNAi-antisense strand
gaggacacaccguugugccuu

SEQ ID NO: 11716 - DNA, 21 bp, Homo sapiens
aacgagttgaaatctgaggcc

SEQ ID NO: 11717 - RNA, 21 nt, RNAi-sense strand
cgaguugaaaucugaggccuu

SEQ ID NO: 11718 - RNA, 21 nt, RNAi-antisense strand
ggccucagauuucaacucguu

SEQ ID NO: 11719 - DNA, 21 bp, Homo sapiens
aaatctgaggccatcattgaa

SEQ ID NO: 11720 - RNA, 21 nt, RNAi-sense strand
aucugaggccaucauugaauu

SEQ ID NO: 11721 - RNA, 21 nt, RNAi-antisense strand
uucaaugauggccucagauuu

SEQ ID NO: 11722 - DNA, 21 bp, Homo sapiens
aatctgaggccatcattgaac

SEQ ID NO: 11723 - RNA, 21 nt, RNAi-sense strand
ucugaggccaucauugaacuu

SEQ ID NO: 11724 - RNA, 21 nt, RNAi-antisense strand
guucaaugauggccucagauu

SEQ ID NO: 11725 - DNA, 21 bp, Homo sapiens
aacatctctgtgccagcgagt

SEQ ID NO: 11726 - RNA, 21 nt, RNAi-sense strand
caucucugugccagcgaguuu

SEQ ID NO: 11727 - RNA, 21 nt, RNAi-antisense strand
acucgcuggcacagagauguu

SEQ ID NO: 11728 - DNA, 21 bp, Homo sapiens
aaatggcgacaagaagattgt

SEQ ID NO: 11729 - RNA, 21 nt, RNAi-sense strand
auggcgacaagaagauuguuu

SEQ ID NO: 11730 - RNA, 21 nt, RNAi-antisense strand
acaaucuucuugucgccauuu

SEQ ID NO: 11731 - DNA, 21 bp, Homo sapiens
aatggcgacaagaagattgtc

SEQ ID NO: 11732 - RNA, 21 nt, RNAi-sense strand
uggcgacaagaagauugucuu

SEQ ID NO: 11733 - RNA, 21 nt, RNAi-antisense strand
gacaaucuucuugucgccauu

SEQ ID NO: 11734 - DNA, 21 bp, Homo sapiens
aagaagaaggacctgaagaag

SEQ ID NO: 11735 - RNA, 21 nt, RNAi-sense strand
gaagaaggaccugaagaaguu

SEQ ID NO: 11736 - RNA, 21 nt, RNAi-antisense strand
cuucuucagguccuucuucuu

SEQ ID NO: 11737 - DNA, 21 bp, Homo sapiens
aagaaggacctgaagaagctt

SEQ ID NO: 11738 - RNA, 21 nt, RNAi-sense strand
gaaggaccugaagaagcuuuu

SEQ ID NO: 11739 - RNA, 21 nt, RNAi-antisense strand
aagcuucuucagguccuucuu

SEQ ID NO: 11740 - DNA, 21 bp, Homo sapiens
aaggacctgaagaagcttgtg

SEQ ID NO: 11741 - RNA, 21 nt, RNAi-sense strand
ggaccugaagaagcuuguguu

SEQ ID NO: 11742 - RNA, 21 nt, RNAi-antisense strand
cacaagcuucuucagguccuu

SEQ ID NO: 11743 - DNA, 21 bp, Homo sapiens
aagaagcttgtgctgtacctg

SEQ ID NO: 11744 - RNA, 21 nt, RNAi-sense strand
gaagcuugugcuguaccuguu

SEQ ID NO: 11745 - RNA, 21 nt, RNAi-antisense strand
cagguacagcacaagcuucuu

SEQ ID NO: 11746 - DNA, 21 bp, Homo sapiens
aagcttgtgctgtacctgaag

SEQ ID NO: 11747 - RNA, 21 nt, RNAi-sense strand
gcuugugcuguaccugaaguu

SEQ ID NO: 11748 - RNA, 21 nt, RNAi-antisense strand
cuucagguacagcacaagcuu

SEQ ID NO: 11749 - DNA, 21 bp, Homo sapiens
aacctcagccaccacttcctc

SEQ ID NO: 11750 - RNA, 21 nt, RNAi-sense strand
ccucagccaccacuuccucuu

SEQ ID NO: 11751 - RNA, 21 nt, RNAi-antisense strand
gaggaagugguggcugagguu

SEQ ID NO: 11752 - DNA, 21 bp, Homo sapiens
aaggtgaagagccagtacttg

SEQ ID NO: 11753 - RNA, 21 nt, RNAi-sense strand
ggugaagagccaguacuuguu

SEQ ID NO: 11754 - RNA, 21 nt, RNAi-antisense strand
caaguacuggcucuucaccuu

SEQ ID NO: 11755 - DNA, 21 bp, Homo sapiens
aagagccagtacttgctgacg

SEQ ID NO: 11756 - RNA, 21 nt, RNAi-sense strand
gagccaguacuugcugacguu

SEQ ID NO: 11757 - RNA, 21 nt, RNAi-antisense strand
cgucagcaaguacuggcucuu

SEQ ID NO: 11758 - DNA, 21 bp, Homo sapiens
aatccagtcggcttgttcttg

SEQ ID NO: 11759 - RNA, 21 nt, RNAi-sense strand
uccagucggcuuguucuuguu

SEQ ID NO: 11760 - RNA, 21 nt, RNAi-antisense strand
caagaacaagccgacuggauu

SEQ ID NO: 11761 - DNA, 21 bp, Homo sapiens
aagatccgcaatgtggagcag

SEQ ID NO: 11762 - RNA, 21 nt, RNAi-sense strand
gauccgcaauguggagcaguu

SEQ ID NO: 11763 - RNA, 21 nt, RNAi-antisense strand
cugcuccacauugcggaucuu

SEQ ID NO: 11764 - DNA, 21 bp, Homo sapiens
aatgtggagcagcagccactg

SEQ ID NO: 11765 - RNA, 21 nt, RNAi-sense strand
uguggagcagcagccacuguu

SEQ ID NO: 11766 - RNA, 21 nt, RNAi-antisense strand
caguggcugcugcuccacauu

SEQ ID NO: 11767 - DNA, 21 bp, Homo sapiens
aaaccatttccaacagcaaca

SEQ ID NO: 11768 - RNA, 21 nt, RNAi-sense strand
accauuuccaacagcaacauu

SEQ ID NO: 11769 - RNA, 21 nt, RNAi-antisense strand
uguugcuguuggaaaugguuu

SEQ ID NO: 11770 - DNA, 21 bp, Homo sapiens
aaccatttccaacagcaacac

SEQ ID NO: 11771 - RNA, 21 nt, RNAi-sense strand
ccauuuccaacagcaacacuu

SEQ ID NO: 11772 - RNA, 21 nt, RNAi-antisense strand
guguugcuguuggaaaugguu

SEQ ID NO: 11773 - DNA, 21 bp, Homo sapiens
aacagcaacacagccactaaa

SEQ ID NO: 11774 - RNA, 21 nt, RNAi-sense strand
cagcaacacagccacuaaauu

SEQ ID NO: 11775 - RNA, 21 nt, RNAi-antisense strand
uuuaguggcuguguugcuguu

SEQ ID NO: 11776 - DNA, 21 bp, Homo sapiens
aaagtgagagccagcagcaaa

SEQ ID NO: 11777 - RNA, 21 nt, RNAi-sense strand
agugagagccagcagcaaauu

SEQ ID NO: 11778 - RNA, 21 nt, RNAi-antisense strand
uuugcugcuggcucucacuuu

SEQ ID NO: 11779 - DNA, 21 bp, Homo sapiens
aacttgttggtgtggatctat

SEQ ID NO: 11780 - RNA, 21 nt, RNAi-sense strand
cuuguugguguggaucuauuu

SEQ ID NO: 11781 - RNA, 21 nt, RNAi-antisense strand
auagauccacaccaacaaguu

SEQ ID NO: 11782 - DNA, 21 bp, Homo sapiens
aattctaatgattggcaagtc

SEQ ID NO: 11783 - RNA, 21 nt, RNAi-sense strand
uucuaaugauuggcaagucuu

SEQ ID NO: 11784 - RNA, 21 nt, RNAi-antisense strand
gacuugccaaucauuagaauu

SEQ ID NO: 11785 - DNA, 21 bp, Homo sapiens
aatgattggcaagtcacgttg

SEQ ID NO: 11786 - RNA, 21 nt, RNAi-sense strand
ugauuggcaagucacguuguu

SEQ ID NO: 11787 - RNA, 21 nt, RNAi-antisense strand
caacgugacuugccaaucauu

SEQ ID NO: 11788 - DNA, 21 bp, Homo sapiens
aaatggaaacagactcatacc

SEQ ID NO: 11789 - RNA, 21 nt, RNAi-sense strand
auggaaacagacucauaccuu

SEQ ID NO: 11790 - RNA, 21 nt, RNAi-antisense strand
gguaugagucuguuuccauuu

SEQ ID NO: 11791 - DNA, 21 bp, Homo sapiens
aatggaaacagactcatacca

SEQ ID NO: 11792 - RNA, 21 nt, RNAi-sense strand
uggaaacagacucauaccauu

SEQ ID NO: 11793 - RNA, 21 nt, RNAi-antisense strand
ugguaugagucuguuuccauu

SEQ ID NO: 11794 - DNA, 21 bp, Homo sapiens
aaacagactcataccacactt

SEQ ID NO: 11795 - RNA, 21 nt, RNAi-sense strand
acagacucauaccacacuuuu

SEQ ID NO: 11796 - RNA, 21 nt, RNAi-antisense strand
aagugugguaugagucuguuu

SEQ ID NO: 11797 - DNA, 21 bp, Homo sapiens
aacagactcataccacactta

SEQ ID NO: 11798 - RNA, 21 nt, RNAi-sense strand
cagacucauaccacacuuauu

SEQ ID NO: 11799 - RNA, 21 nt, RNAi-antisense strand
uaagugugguaugagucuguu

SEQ ID NO: 11800 - DNA, 21 bp, Homo sapiens
aaagtgcaagtccattatcta

SEQ ID NO: 11801 - RNA, 21 nt, RNAi-sense strand
agugcaaguccauuaucuauu

SEQ ID NO: 11802 - RNA, 21 nt, RNAi-antisense strand
uagauaauggacuugcacuuu

SEQ ID NO: 11803 - DNA, 21 bp, Homo sapiens
aagtgcaagtccattatctaa

SEQ ID NO: 11804 - RNA, 21 nt, RNAi-sense strand
gugcaaguccauuaucuaauu

SEQ ID NO: 11805 - RNA, 21 nt, RNAi-antisense strand
uuagauaauggacuugcacuu

SEQ ID NO: 11806 - DNA, 21 bp, Homo sapiens
aatctgaatcagccagtctca

SEQ ID NO: 11807 - RNA, 21 nt, RNAi-sense strand
ucugaaucagccagucucauu

SEQ ID NO: 11808 - RNA, 21 nt, RNAi-antisense strand
ugagacuggcugauucagauu

SEQ ID NO: 11809 - DNA, 21 bp, Homo sapiens
aatcagccagtctcagatgcc

SEQ ID NO: 11810 - RNA, 21 nt, RNAi-sense strand
ucagccagucucagaugccuu

SEQ ID NO: 11811 - RNA, 21 nt, RNAi-antisense strand
ggcaucugagacuggcugauu

SEQ ID NO: 11812 - DNA, 21 bp, Homo sapiens
aaagtttcggttcctatgagc

SEQ ID NO: 11813 - RNA, 21 nt, RNAi-sense strand
aguuucgguuccuaugagcuu

SEQ ID NO: 11814 - RNA, 21 nt, RNAi-antisense strand
gcucauaggaaccgaaacuuu

SEQ ID NO: 11815 - DNA, 21 bp, Homo sapiens
aagtttcggttcctatgagcc

SEQ ID NO: 11816 - RNA, 21 nt, RNAi-sense strand
guuucgguuccuaugagccuu

SEQ ID NO: 11817 - RNA, 21 nt, RNAi-antisense strand
ggcucauaggaaccgaaacuu

SEQ ID NO: 11818 - DNA, 21 bp, Homo sapiens
aaaggaaaccacagtgagcct

SEQ ID NO: 11819 - RNA, 21 nt, RNAi-sense strand
aggaaaccacagugagccuuu

SEQ ID NO: 11820 - RNA, 21 nt, RNAi-antisense strand
aggcucacugugguuuccuuu

SEQ ID NO: 11821 - DNA, 21 bp, Homo sapiens
aaggaaaccacagtgagcctg

SEQ ID NO: 11822 - RNA, 21 nt, RNAi-sense strand
ggaaaccacagugagccuguu

SEQ ID NO: 11823 - RNA, 21 nt, RNAi-antisense strand
caggcucacugugguuuccuu

SEQ ID NO: 11824 - DNA, 21 bp, Homo sapiens
aaaccacagtgagcctgagag

SEQ ID NO: 11825 - RNA, 21 nt, RNAi-sense strand
accacagugagccugagaguu

SEQ ID NO: 11826 - RNA, 21 nt, RNAi-antisense strand
cucucaggcucacugugguuu

SEQ ID NO: 11827 - DNA, 21 bp, Homo sapiens
aaccacagtgagcctgagaga

SEQ ID NO: 11828 - RNA, 21 nt, RNAi-sense strand
ccacagugagccugagagauu

SEQ ID NO: 11829 - RNA, 21 nt, RNAi-antisense strand
ucucucaggcucacugugguu

SEQ ID NO: 11830 - DNA, 21 bp, Homo sapiens
aacagtccagcaaattgctag

SEQ ID NO: 11831 - RNA, 21 nt, RNAi-sense strand
caguccagcaaauugcuaguu

SEQ ID NO: 11832 - RNA, 21 nt, RNAi-antisense strand
cuagcaauuugcuggacuguu

SEQ ID NO: 11833 - DNA, 21 bp, Homo sapiens
aagagcttaggattctaatct

SEQ ID NO: 11834 - RNA, 21 nt, RNAi-sense strand
gagcuuaggauucuaaucuuu

SEQ ID NO: 11835 - RNA, 21 nt, RNAi-antisense strand
agauuagaauccuaagcucuu

SEQ ID NO: 11836 - DNA, 21 bp, Homo sapiens
aaacagtctacattgagcatt

SEQ ID NO: 11837 - RNA, 21 nt, RNAi-sense strand
acagucuacauugagcauuuu

SEQ ID NO: 11838 - RNA, 21 nt, RNAi-antisense strand
aaugcucaauguagacuguuu

SEQ ID NO: 11839 - DNA, 21 bp, Homo sapiens
aacagtctacattgagcattt

SEQ ID NO: 11840 - RNA, 21 nt, RNAi-sense strand
cagucuacauugagcauuuuu

SEQ ID NO: 11841 - RNA, 21 nt, RNAi-antisense strand
aaaugcucaauguagacuguu

SEQ ID NO: 11842 - DNA, 21 bp, Homo sapiens
aaaggtgtgctagaacaaggt

SEQ ID NO: 11843 - RNA, 21 nt, RNAi-sense strand
aggugugcuagaacaagguuu

SEQ ID NO: 11844 - RNA, 21 nt, RNAi-antisense strand
accuuguucuagcacaccuuu

SEQ ID NO: 11845 - DNA, 21 bp, Homo sapiens
aaggtgtgctagaacaaggtc

SEQ ID NO: 11846 - RNA, 21 nt, RNAi-sense strand
ggugugcuagaacaaggucuu

SEQ ID NO: 11847 - RNA, 21 nt, RNAi-antisense strand
gaccuuguucuagcacaccuu

SEQ ID NO: 11848 - DNA, 21 bp, Homo sapiens
aacaaggtctcctgatccgtc

SEQ ID NO: 11849 - RNA, 21 nt, RNAi-sense strand
caaggucuccugauccgucuu

SEQ ID NO: 11850 - RNA, 21 nt, RNAi-antisense strand
gacggaucaggagaccuuguu

SEQ ID NO: 11851 - DNA, 21 bp, Homo sapiens
aaggtctcctgatccgtccga

SEQ ID NO: 11852 - RNA, 21 nt, RNAi-sense strand
ggucuccugauccguccgauu

SEQ ID NO: 11853 - RNA, 21 nt, RNAi-antisense strand
ucggacggaucaggagaccuu

SEQ ID NO: 11854 - DNA, 21 bp, Homo sapiens
aaactcacagagctttccgtt

SEQ ID NO: 11855 - RNA, 21 nt, RNAi-sense strand
acucacagagcuuuccguuuu

SEQ ID NO: 11856 - RNA, 21 nt, RNAi-antisense strand
aacggaaagcucugugaguuu

SEQ ID NO: 11857 - DNA, 21 bp, Homo sapiens
aactcacagagctttccgttt

SEQ ID NO: 11858 - RNA, 21 nt, RNAi-sense strand
cucacagagcuuuccguuuuu

SEQ ID NO: 11859 - RNA, 21 nt, RNAi-antisense strand
aaacggaaagcucugugaguu

SEQ ID NO: 11860 - DNA, 21 bp, Homo sapiens
aacttgattgcctatggatca

SEQ ID NO: 11861 - RNA, 21 nt, RNAi-sense strand
cuugauugccuauggaucauu

SEQ ID NO: 11862 - RNA, 21 nt, RNAi-antisense strand
ugauccauaggcaaucaaguu

SEQ ID NO: 11863 - DNA, 21 bp, Homo sapiens
aaagaaattcagaacagcctg

SEQ ID NO: 11864 - RNA, 21 nt, RNAi-sense strand
agaaauucagaacagccuguu

SEQ ID NO: 11865 - RNA, 21 nt, RNAi-antisense strand
caggcuguucugaauuucuuu

SEQ ID NO: 11866 - DNA, 21 bp, Homo sapiens
aagaaattcagaacagcctgc

SEQ ID NO: 11867 - RNA, 21 nt, RNAi-sense strand
gaaauucagaacagccugcuu

SEQ ID NO: 11868 - RNA, 21 nt, RNAi-antisense strand
gcaggcuguucugaauuucuu

SEQ ID NO: 11869 - DNA, 21 bp, Homo sapiens
aaattcagaacagcctgcctg

SEQ ID NO: 11870 - RNA, 21 nt, RNAi-sense strand
auucagaacagccugccuguu

SEQ ID NO: 11871 - RNA, 21 nt, RNAi-antisense strand
caggcaggcuguucugaauuu

SEQ ID NO: 11872 - DNA, 21 bp, Homo sapiens
aattcagaacagcctgcctgt

SEQ ID NO: 11873 - RNA, 21 nt, RNAi-sense strand
uucagaacagccugccuguuu

SEQ ID NO: 11874 - RNA, 21 nt, RNAi-antisense strand
acaggcaggcuguucugaauu

SEQ ID NO: 11875 - DNA, 21 bp, Homo sapiens
aatcagcgatgtatataagcc

SEQ ID NO: 11876 - RNA, 21 nt, RNAi-sense strand
ucagcgauguauauaagccuu

SEQ ID NO: 11877 - RNA, 21 nt, RNAi-antisense strand
ggcuuauauacaucgcugauu

SEQ ID NO: 11878 - DNA, 21 bp, Homo sapiens
aagccagttcacttagacaac

SEQ ID NO: 11879 - RNA, 21 nt, RNAi-sense strand
gccaguucacuuagacaacuu

SEQ ID NO: 11880 - RNA, 21 nt, RNAi-antisense strand
guugucuaagugaacuggcuu

SEQ ID NO: 11881 - DNA, 21 bp, Homo sapiens
aatgtacaggaagtagttcta

SEQ ID NO: 11882 - RNA, 21 nt, RNAi-sense strand
uguacaggaaguaguucuauu

SEQ ID NO: 11883 - RNA, 21 nt, RNAi-antisense strand
uagaacuacuuccuguacauu

SEQ ID NO: 11884 - DNA, 21 bp, Homo sapiens
aaagccggattcttaattctc

SEQ ID NO: 11885 - RNA, 21 nt, RNAi-sense strand
agccggauucuuaauucucuu

SEQ ID NO: 11886 - RNA, 21 nt, RNAi-antisense strand
gagaauuaagaauccggcuuu

SEQ ID NO: 11887 - DNA, 21 bp, Homo sapiens
aagccggattcttaattctct

SEQ ID NO: 11888 - RNA, 21 nt, RNAi-sense strand
gccggauucuuaauucucuuu

SEQ ID NO: 11889 - RNA, 21 nt, RNAi-antisense strand
agagaauuaagaauccggcuu

SEQ ID NO: 11890 - DNA, 21 bp, Homo sapiens
aattctctgcaacactttgag

SEQ ID NO: 11891 - RNA, 21 nt, RNAi-sense strand
uucucugcaacacuuugaguu

SEQ ID NO: 11892 - RNA, 21 nt, RNAi-antisense strand
cucaaaguguugcagagaauu

SEQ ID NO: 11893 - DNA, 21 bp, Homo sapiens
aacactttgaggacatttatg

SEQ ID NO: 11894 - RNA, 21 nt, RNAi-sense strand
cacuuugaggacauuuauguu

SEQ ID NO: 11895 - RNA, 21 nt, RNAi-antisense strand
cauaaauguccucaaaguguu

SEQ ID NO: 11896 - DNA, 21 bp, Homo sapiens
aaaggatggtagattctgtta

SEQ ID NO: 11897 - RNA, 21 nt, RNAi-sense strand
aggaugguagauucuguuauu

SEQ ID NO: 11898 - RNA, 21 nt, RNAi-antisense strand
uaacagaaucuaccauccuuu

SEQ ID NO: 11899 - DNA, 21 bp, Homo sapiens
aaggatggtagattctgttaa

SEQ ID NO: 11900 - RNA, 21 nt, RNAi-sense strand
ggaugguagauucuguuaauu

SEQ ID NO: 11901 - RNA, 21 nt, RNAi-antisense strand
uuaacagaaucuaccauccuu

SEQ ID NO: 11902 - DNA, 21 bp, Homo sapiens
aactcttgaagactccagtat

SEQ ID NO: 11903 - RNA, 21 nt, RNAi-sense strand
cucuugaagacuccaguauuu

SEQ ID NO: 11904 - RNA, 21 nt, RNAi-antisense strand
auacuggagucuucaagaguu

SEQ ID NO: 11905 - DNA, 21 bp, Homo sapiens
aaattaacctctcacagttag

SEQ ID NO: 11906 - RNA, 21 nt, RNAi-sense strand
auuaaccucucacaguuaguu

SEQ ID NO: 11907 - RNA, 21 nt, RNAi-antisense strand
cuaacugugagagguuaauuu

SEQ ID NO: 11908 - DNA, 21 bp, Homo sapiens
aattaacctctcacagttagt

SEQ ID NO: 11909 - RNA, 21 nt, RNAi-sense strand
uuaaccucucacaguuaguuu

SEQ ID NO: 11910 - RNA, 21 nt, RNAi-antisense strand
acuaacugugagagguuaauu

SEQ ID NO: 11911 - DNA, 21 bp, Homo sapiens
aacctctcacagttagtgatc

SEQ ID NO: 11912 - RNA, 21 nt, RNAi-sense strand
ccucucacaguuagugaucuu

SEQ ID NO: 11913 - RNA, 21 nt, RNAi-antisense strand
gaucacuaacugugagagguu

SEQ ID NO: 11914 - DNA, 21 bp, Homo sapiens
aaactgaaattcagagcaagt

SEQ ID NO: 11915 - RNA, 21 nt, RNAi-sense strand
acugaaauucagagcaaguuu

SEQ ID NO: 11916 - RNA, 21 nt, RNAi-antisense strand
acuugcucugaauuucaguuu

SEQ ID NO: 11917 - DNA, 21 bp, Homo sapiens
aactgaaattcagagcaagtt

SEQ ID NO: 11918 - RNA, 21 nt, RNAi-sense strand
cugaaauucagagcaaguuuu

SEQ ID NO: 11919 - RNA, 21 nt, RNAi-antisense strand
aacuugcucugaauuucaguu

SEQ ID NO: 11920 - DNA, 21 bp, Homo sapiens
aaattcagagcaagttcctga

SEQ ID NO: 11921 - RNA, 21 nt, RNAi-sense strand
auucagagcaaguuccugauu

SEQ ID NO: 11922 - RNA, 21 nt, RNAi-antisense strand
ucaggaacuugcucugaauuu

SEQ ID NO: 11923 - DNA, 21 bp, Homo sapiens
aattcagagcaagttcctgag

SEQ ID NO: 11924 - RNA, 21 nt, RNAi-sense strand
uucagagcaaguuccugaguu

SEQ ID NO: 11925 - RNA, 21 nt, RNAi-antisense strand
cucaggaacuugcucugaauu

SEQ ID NO: 11926 - DNA, 21 bp, Homo sapiens
aagttcctgagtgcgtggatc

SEQ ID NO: 11927 - RNA, 21 nt, RNAi-sense strand
guuccugagugcguggaucuu

SEQ ID NO: 11928 - RNA, 21 nt, RNAi-antisense strand
gauccacgcacucaggaacuu

SEQ ID NO: 11929 - DNA, 21 bp, Homo sapiens
aagagttcagtgctcatacgt

SEQ ID NO: 11930 - RNA, 21 nt, RNAi-sense strand
gaguucagugcucauacguuu

SEQ ID NO: 11931 - RNA, 21 nt, RNAi-antisense strand
acguaugagcacugaacucuu

SEQ ID NO: 11932 - DNA, 21 bp, Homo sapiens
aacataagtagttaccacaga

SEQ ID NO: 11933 - RNA, 21 nt, RNAi-sense strand
cauaaguaguuaccacagauu

SEQ ID NO: 11934 - RNA, 21 nt, RNAi-antisense strand
ucugugguaacuacuuauguu

SEQ ID NO: 11935 - DNA, 21 bp, Homo sapiens
aagtagttaccacagaatacg

SEQ ID NO: 11936 - RNA, 21 nt, RNAi-sense strand
guaguuaccacagaauacguu

SEQ ID NO: 11937 - RNA, 21 nt, RNAi-antisense strand
cguauucugugguaacuacuu

SEQ ID NO: 11938 - DNA, 21 bp, Homo sapiens
aatacggaagagcaggtgact

SEQ ID NO: 11939 - RNA, 21 nt, RNAi-sense strand
uacggaagagcaggugacuuu

SEQ ID NO: 11940 - RNA, 21 nt, RNAi-antisense strand
agucaccugcucuuccguauu

SEQ ID NO: 11941 - DNA, 21 bp, Homo sapiens
aagagcaggtgactgtgctgt

SEQ ID NO: 11942 - RNA, 21 nt, RNAi-sense strand
gagcaggugacugugcuguuu

SEQ ID NO: 11943 - RNA, 21 nt, RNAi-antisense strand
acagcacagucaccugcucuu

SEQ ID NO: 11944 - DNA, 21 bp, Homo sapiens
aattctcaggtaggaagcaac

SEQ ID NO: 11945 - RNA, 21 nt, RNAi-sense strand
uucucagguaggaagcaacuu

SEQ ID NO: 11946 - RNA, 21 nt, RNAi-antisense strand
guugcuuccuaccugagaauu

SEQ ID NO: 11947 - DNA, 21 bp, Homo sapiens
aagcaacagcttcagaaagag

SEQ ID NO: 11948 - RNA, 21 nt, RNAi-sense strand
gcaacagcuucagaaagaguu

SEQ ID NO: 11949 - RNA, 21 nt, RNAi-antisense strand
cucuuucugaagcuguugcuu

SEQ ID NO: 11950 - DNA, 21 bp, Homo sapiens
aacagcttcagaaagagctca

SEQ ID NO: 11951 - RNA, 21 nt, RNAi-sense strand
cagcuucagaaagagcucauu

SEQ ID NO: 11952 - RNA, 21 nt, RNAi-antisense strand
ugagcucuuucugaagcuguu

SEQ ID NO: 11953 - DNA, 21 bp, Homo sapiens
aaattggaaatgtgaatcgca

SEQ ID NO: 11954 - RNA, 21 nt, RNAi-sense strand
auuggaaaugugaaucgcauu

SEQ ID NO: 11955 - RNA, 21 nt, RNAi-antisense strand
ugcgauucacauuuccaauuu

SEQ ID NO: 11956 - DNA, 21 bp, Homo sapiens
aattggaaatgtgaatcgcag

SEQ ID NO: 11957 - RNA, 21 nt, RNAi-sense strand
uuggaaaugugaaucgcaguu

SEQ ID NO: 11958 - RNA, 21 nt, RNAi-antisense strand
cugcgauucacauuuccaauu

SEQ ID NO: 11959 - DNA, 21 bp, Homo sapiens
aaatgtgaatcgcagctgtgg

SEQ ID NO: 11960 - RNA, 21 nt, RNAi-sense strand
augugaaucgcagcugugguu

SEQ ID NO: 11961 - RNA, 21 nt, RNAi-antisense strand
ccacagcugcgauucacauuu

SEQ ID NO: 11962 - DNA, 21 bp, Homo sapiens
aaaccaatgtgcagactgatt

SEQ ID NO: 11963 - RNA, 21 nt, RNAi-sense strand
accaaugugcagacugauuuu

SEQ ID NO: 11964 - RNA, 21 nt, RNAi-antisense strand
aaucagucugcacauugguuu

SEQ ID NO: 11965 - DNA, 21 bp, Homo sapiens
aaccaatgtgcagactgattg

SEQ ID NO: 11966 - RNA, 21 nt, RNAi-sense strand
ccaaugugcagacugauuguu

SEQ ID NO: 11967 - RNA, 21 nt, RNAi-antisense strand
caaucagucugcacauugguu

SEQ ID NO: 11968 - DNA, 21 bp, Homo sapiens
aatgtgcagactgattggcct

SEQ ID NO: 11969 - RNA, 21 nt, RNAi-sense strand
ugugcagacugauuggccuuu

SEQ ID NO: 11970 - RNA, 21 nt, RNAi-antisense strand
aggccaaucagucugcacauu

SEQ ID NO: 11971 - DNA, 21 bp, Homo sapiens
aatcattctggatagagtcct

SEQ ID NO: 11972 - RNA, 21 nt, RNAi-sense strand
ucauucuggauagaguccuuu

SEQ ID NO: 11973 - RNA, 21 nt, RNAi-antisense strand
aggacucuauccagaaugauu

SEQ ID NO: 11974 - DNA, 21 bp, Homo sapiens
aaatatcctgtgtaacacttg

SEQ ID NO: 11975 - RNA, 21 nt, RNAi-sense strand
auauccuguguaacacuuguu

SEQ ID NO: 11976 - RNA, 21 nt, RNAi-antisense strand
caaguguuacacaggauauuu

SEQ ID NO: 11977 - DNA, 21 bp, Homo sapiens
aatatcctgtgtaacacttgg

SEQ ID NO: 11978 - RNA, 21 nt, RNAi-sense strand
uauccuguguaacacuugguu

SEQ ID NO: 11979 - RNA, 21 nt, RNAi-antisense strand
ccaaguguuacacaggauauu

SEQ ID NO: 11980 - DNA, 21 bp, Homo sapiens
aacacttggctcttggtacct

SEQ ID NO: 11981 - RNA, 21 nt, RNAi-sense strand
cacuuggcucuugguaccuuu

SEQ ID NO: 11982 - RNA, 21 nt, RNAi-antisense strand
agguaccaagagccaaguguu

SEQ ID NO: 11983 - DNA, 21 bp, Homo sapiens
aattcaatcagagctccagtt

SEQ ID NO: 11984 - RNA, 21 nt, RNAi-sense strand
uucaaucagagcuccaguuuu

SEQ ID NO: 11985 - RNA, 21 nt, RNAi-antisense strand
aacuggagcucugauugaauu

SEQ ID NO: 11986 - DNA, 21 bp, Homo sapiens
aatcagagctccagtttgcat

SEQ ID NO: 11987 - RNA, 21 nt, RNAi-sense strand
ucagagcuccaguuugcauuu

SEQ ID NO: 11988 - RNA, 21 nt, RNAi-antisense strand
augcaaacuggagcucugauu

SEQ ID NO: 11989 - DNA, 21 bp, Homo sapiens
aactggttgctgtgtcataac

SEQ ID NO: 11990 - RNA, 21 nt, RNAi-sense strand
cugguugcugugucauaacuu

SEQ ID NO: 11991 - RNA, 21 nt, RNAi-antisense strand
guuaugacacagcaaccaguu

SEQ ID NO: 11992 - DNA, 21 bp, Homo sapiens
aacttcatagatgcaggaggc

SEQ ID NO: 11993 - RNA, 21 nt, RNAi-sense strand
cuucauagaugcaggaggcuu

SEQ ID NO: 11994 - RNA, 21 nt, RNAi-antisense strand
gccuccugcaucuaugaaguu

SEQ ID NO: 11995 - DNA, 21 bp, Homo sapiens
aataacatactggccgttctg

SEQ ID NO: 11996 - RNA, 21 nt, RNAi-sense strand
uaacauacuggccguucuguu

SEQ ID NO: 11997 - RNA, 21 nt, RNAi-antisense strand
cagaacggccaguauguuauu

SEQ ID NO: 11998 - DNA, 21 bp, Homo sapiens
aacatactggccgttctgacc

SEQ ID NO: 11999 - RNA, 21 nt, RNAi-sense strand
cauacuggccguucugaccuu

SEQ ID NO: 12000 - RNA, 21 nt, RNAi-antisense strand
ggucagaacggccaguauguu

SEQ ID NO: 12001 - DNA, 21 bp, Homo sapiens
cagcgagtacgactacgtgag

SEQ ID NO: 12002 - RNA, 21 nt, RNAi-sense strand
gcgaguacgacuacgugaguu

SEQ ID NO: 12003 - RNA, 21 nt, RNAi-antisense strand
cucacguagucguacucgcuu

SEQ ID NO: 12004 - DNA, 21 bp, Homo sapiens
caccaagccacctcagtgcgt

SEQ ID NO: 12005 - RNA, 21 nt, RNAi-sense strand
ccaagccaccucagugcguuu

SEQ ID NO: 12006 - RNA, 21 nt, RNAi-antisense strand
acgcacugagguggcuugguu

SEQ ID NO: 12007 - DNA, 21 bp, Homo sapiens
caagccacctcagtgcgtgga

SEQ ID NO: 12008 - RNA, 21 nt, RNAi-sense strand
agccaccucagugcguggauu

SEQ ID NO: 12009 - RNA, 21 nt, RNAi-antisense strand
uccacgcacugagguggcuuu

SEQ ID NO: 12010 - DNA, 21 bp, Homo sapiens
cacctcagtgcgtggacatcc

SEQ ID NO: 12011 - RNA, 21 nt, RNAi-sense strand
ccucagugcguggacauccuu

SEQ ID NO: 12012 - RNA, 21 nt, RNAi-antisense strand
ggauguccacgcacugagguu

SEQ ID NO: 12013 - DNA, 21 bp, Homo sapiens
caacctgctggagcacgagac

SEQ ID NO: 12014 - RNA, 21 nt, RNAi-sense strand
accugcuggagcacgagacuu

SEQ ID NO: 12015 - RNA, 21 nt, RNAi-antisense strand
gucucgugcuccagcagguuu

SEQ ID NO: 12016 - DNA, 21 bp, Homo sapiens
catggcggaggtgaagcagca

SEQ ID NO: 12017 - RNA, 21 nt, RNAi-sense strand
uggcggaggugaagcagcauu

SEQ ID NO: 12018 - RNA, 21 nt, RNAi-antisense strand
ugcugcuucaccuccgccauu

SEQ ID NO: 12019 - DNA, 21 bp, Homo sapiens
caacaagaactgccacgccgg

SEQ ID NO: 12020 - RNA, 21 nt, RNAi-sense strand
acaagaacugccacgccgguu

SEQ ID NO: 12021 - RNA, 21 nt, RNAi-antisense strand
ccggcguggcaguucuuguuu

SEQ ID NO: 12022 - DNA, 21 bp, Homo sapiens
caggtcttcctctgctcgctc

SEQ ID NO: 12023 - RNA, 21 nt, RNAi-sense strand
ggucuuccucugcucgcucuu

SEQ ID NO: 12024 - RNA, 21 nt, RNAi-antisense strand
gagcgagcagaggaagaccuu

SEQ ID NO: 12025 - DNA, 21 bp, Homo sapiens
catgcagttcttcggcttcta

SEQ ID NO: 12026 - RNA, 21 nt, RNAi-sense strand
ugcaguucuucggcuucuauu

SEQ ID NO: 12027 - RNA, 21 nt, RNAi-antisense strand
uagaagccgaagaacugcauu

SEQ ID NO: 12028 - DNA, 21 bp, Homo sapiens
cagttcttcggcttctactgg

SEQ ID NO: 12029 - RNA, 21 nt, RNAi-sense strand
guucuucggcuucuacugguu

SEQ ID NO: 12030 - RNA, 21 nt, RNAi-antisense strand
ccaguagaagccgaagaacuu

SEQ ID NO: 12031 - DNA, 21 bp, Homo sapiens
caatgccaccgaagcctccaa

SEQ ID NO: 12032 - RNA, 21 nt, RNAi-sense strand
augccaccgaagccuccaauu

SEQ ID NO: 12033 - RNA, 21 nt, RNAi-antisense strand
uuggaggcuucgguggcauuu

SEQ ID NO: 12034 - DNA, 21 bp, Homo sapiens
caaggcacaacggtgtgtcct

SEQ ID NO: 12035 - RNA, 21 nt, RNAi-sense strand
aggcacaacgguguguccuuu

SEQ ID NO: 12036 - RNA, 21 nt, RNAi-antisense strand
aggacacaccguugugccuuu

SEQ ID NO: 12037 - DNA, 21 bp, Homo sapiens
caacgagttgaaatctgaggc

SEQ ID NO: 12038 - RNA, 21 nt, RNAi-sense strand
acgaguugaaaucugaggcuu

SEQ ID NO: 12039 - RNA, 21 nt, RNAi-antisense strand
gccucagauuucaacucguuu

SEQ ID NO: 12040 - DNA, 21 bp, Homo sapiens
catcattgaacatctctgtgc

SEQ ID NO: 12041 - RNA, 21 nt, RNAi-sense strand
ucauugaacaucucugugcuu

SEQ ID NO: 12042 - RNA, 21 nt, RNAi-antisense strand
gcacagagauguucaaugauu

SEQ ID NO: 12043 - DNA, 21 bp, Homo sapiens
cattgaacatctctgtgccag

SEQ ID NO: 12044 - RNA, 21 nt, RNAi-sense strand
uugaacaucucugugccaguu

SEQ ID NO: 12045 - RNA, 21 nt, RNAi-antisense strand
cuggcacagagauguucaauu

SEQ ID NO: 12046 - DNA, 21 bp, Homo sapiens
catctctgtgccagcgagttt

SEQ ID NO: 12047 - RNA, 21 nt, RNAi-sense strand
ucucugugccagcgaguuuuu

SEQ ID NO: 12048 - RNA, 21 nt, RNAi-antisense strand
aaacucgcuggcacagagauu

SEQ ID NO: 12049 - DNA, 21 bp, Homo sapiens
cagcgagtttgcactgaggat

SEQ ID NO: 12050 - RNA, 21 nt, RNAi-sense strand
gcgaguuugcacugaggauuu

SEQ ID NO: 12051 - RNA, 21 nt, RNAi-antisense strand
auccucagugcaaacucgcuu

SEQ ID NO: 12052 - DNA, 21 bp, Homo sapiens
catcaagaagaaggacctgaa

SEQ ID NO: 12053 - RNA, 21 nt, RNAi-sense strand
ucaagaagaaggaccugaauu

SEQ ID NO: 12054 - RNA, 21 nt, RNAi-antisense strand
uucagguccuucuucuugauu

SEQ ID NO: 12055 - DNA, 21 bp, Homo sapiens
caagaagaaggacctgaagaa

SEQ ID NO: 12056 - RNA, 21 nt, RNAi-sense strand
agaagaaggaccugaagaauu

SEQ ID NO: 12057 - RNA, 21 nt, RNAi-antisense strand
uucuucagguccuucuucuuu

SEQ ID NO: 12058 - DNA, 21 bp, Homo sapiens
caccagctggacaacctcagc

SEQ ID NO: 12059 - RNA, 21 nt, RNAi-sense strand
ccagcuggacaaccucagcuu

SEQ ID NO: 12060 - RNA, 21 nt, RNAi-antisense strand
gcugagguuguccagcugguu

SEQ ID NO: 12061 - DNA, 21 bp, Homo sapiens
cagctggacaacctcagccac

SEQ ID NO: 12062 - RNA, 21 nt, RNAi-sense strand
gcuggacaaccucagccacuu

SEQ ID NO: 12063 - RNA, 21 nt, RNAi-antisense strand
guggcugagguuguccagcuu

SEQ ID NO: 12064 - DNA, 21 bp, Homo sapiens
caacctcagccaccacttcct

SEQ ID NO: 12065 - RNA, 21 nt, RNAi-sense strand
accucagccaccacuuccuuu

SEQ ID NO: 12066 - RNA, 21 nt, RNAi-antisense strand
aggaagugguggcugagguuu

SEQ ID NO: 12067 - DNA, 21 bp, Homo sapiens
cagccaccacttcctcatcat

SEQ ID NO: 12068 - RNA, 21 nt, RNAi-sense strand
gccaccacuuccucaucauuu

SEQ ID NO: 12069 - RNA, 21 nt, RNAi-antisense strand
augaugaggaagugguggcuu

SEQ ID NO: 12070 - DNA, 21 bp, Homo sapiens
caaggtgaagagccagtactt

SEQ ID NO: 12071 - RNA, 21 nt, RNAi-sense strand
aggugaagagccaguacuuuu

SEQ ID NO: 12072 - RNA, 21 nt, RNAi-antisense strand
aaguacuggcucuucaccuuu

SEQ ID NO: 12073 - DNA, 21 bp, Homo sapiens
cagtacttgctgacggccatc

SEQ ID NO: 12074 - RNA, 21 nt, RNAi-sense strand
guacuugcugacggccaucuu

SEQ ID NO: 12075 - RNA, 21 nt, RNAi-antisense strand
gauggccgucagcaaguacuu

SEQ ID NO: 12076 - DNA, 21 bp, Homo sapiens
cacctttcagtccgtgtttaa

SEQ ID NO: 12077 - RNA, 21 nt, RNAi-sense strand
ccuuucaguccguguuuaauu

SEQ ID NO: 12078 - RNA, 21 nt, RNAi-antisense strand
uuaaacacggacugaaagguu

SEQ ID NO: 12079 - DNA, 21 bp, Homo sapiens
cagtccgtgtttaagtgattc

SEQ ID NO: 12080 - RNA, 21 nt, RNAi-sense strand
guccguguuuaagugauucuu

SEQ ID NO: 12081 - RNA, 21 nt, RNAi-antisense strand
gaaucacuuaaacacggacuu

SEQ ID NO: 12082 - DNA, 21 bp, Homo sapiens
cagtagtggacattgtaatcc

SEQ ID NO: 12083 - RNA, 21 nt, RNAi-sense strand
guaguggacauuguaauccuu

SEQ ID NO: 12084 - RNA, 21 nt, RNAi-antisense strand
ggauuacaauguccacuacuu

SEQ ID NO: 12085 - DNA, 21 bp, Homo sapiens
cattgtaatccagtcggcttg

SEQ ID NO: 12086 - RNA, 21 nt, RNAi-sense strand
uuguaauccagucggcuuguu

SEQ ID NO: 12087 - RNA, 21 nt, RNAi-antisense strand
caagccgacuggauuacaauu

SEQ ID NO: 12088 - DNA, 21 bp, Homo sapiens
cagtcggcttgttcttgcagc

SEQ ID NO: 12089 - RNA, 21 nt, RNAi-sense strand
gucggcuuguucuugcagcuu

SEQ ID NO: 12090 - RNA, 21 nt, RNAi-antisense strand
gcugcaagaacaagccgacuu

SEQ ID NO: 12091 - DNA, 21 bp, Homo sapiens
caatgtggagcagcagccact

SEQ ID NO: 12092 - RNA, 21 nt, RNAi-sense strand
auguggagcagcagccacuuu

SEQ ID NO: 12093 - RNA, 21 nt, RNAi-antisense strand
aguggcugcugcuccacauuu

SEQ ID NO: 12094 - DNA, 21 bp, Homo sapiens
cactgcacaggaggaggtgac

SEQ ID NO: 12095 - RNA, 21 nt, RNAi-sense strand
cugcacaggaggaggugacuu

SEQ ID NO: 12096 - RNA, 21 nt, RNAi-antisense strand
gucaccuccuccugugcaguu

SEQ ID NO: 12097 - DNA, 21 bp, Homo sapiens
cacaggaggaggtgacaaacc

SEQ ID NO: 12098 - RNA, 21 nt, RNAi-sense strand
caggaggaggugacaaaccuu

SEQ ID NO: 12099 - RNA, 21 nt, RNAi-antisense strand
gguuugucaccuccuccuguu

SEQ ID NO: 12100 - DNA, 21 bp, Homo sapiens
caggaggaggtgacaaaccat

SEQ ID NO: 12101 - RNA, 21 nt, RNAi-sense strand
ggaggaggugacaaaccauuu

SEQ ID NO: 12102 - RNA, 21 nt, RNAi-antisense strand
augguuugucaccuccuccuu

SEQ ID NO: 12103 - DNA, 21 bp, Homo sapiens
caaaccatttccaacagcaac

SEQ ID NO: 12104 - RNA, 21 nt, RNAi-sense strand
aaccauuuccaacagcaacuu

SEQ ID NO: 12105 - RNA, 21 nt, RNAi-antisense strand
guugcuguuggaaaugguuuu

SEQ ID NO: 12106 - DNA, 21 bp, Homo sapiens
catttccaacagcaacacagc

SEQ ID NO: 12107 - RNA, 21 nt, RNAi-sense strand
uuuccaacagcaacacagcuu

SEQ ID NO: 12108 - RNA, 21 nt, RNAi-antisense strand
gcuguguugcuguuggaaauu

SEQ ID NO: 12109 - DNA, 21 bp, Homo sapiens
caacagcaacacagccactaa

SEQ ID NO: 12110 - RNA, 21 nt, RNAi-sense strand
acagcaacacagccacuaauu

SEQ ID NO: 12111 - RNA, 21 nt, RNAi-antisense strand
uuaguggcuguguugcuguuu

SEQ ID NO: 12112 - DNA, 21 bp, Homo sapiens
caacttgttggtgtggatcta

SEQ ID NO: 12113 - RNA, 21 nt, RNAi-sense strand
acuuguugguguggaucuauu

SEQ ID NO: 12114 - RNA, 21 nt, RNAi-antisense strand
uagauccacaccaacaaguuu

SEQ ID NO: 12115 - DNA, 21 bp, Homo sapiens
caggtccagagtagtttcttt

SEQ ID NO: 12116 - RNA, 21 nt, RNAi-sense strand
gguccagaguaguuucuuuuu

SEQ ID NO: 12117 - RNA, 21 nt, RNAi-antisense strand
aaagaaacuacucuggaccuu

SEQ ID NO: 12118 - DNA, 21 bp, Homo sapiens
cagagtagtttctttctgtct

SEQ ID NO: 12119 - RNA, 21 nt, RNAi-sense strand
gaguaguuucuuucugucuuu

SEQ ID NO: 12120 - RNA, 21 nt, RNAi-antisense strand
agacagaaagaaacuacucuu

SEQ ID NO: 12121 - DNA, 21 bp, Homo sapiens
cagactcataccacacttaca

SEQ ID NO: 12122 - RNA, 21 nt, RNAi-sense strand
gacucauaccacacuuacauu

SEQ ID NO: 12123 - RNA, 21 nt, RNAi-antisense strand
uguaagugugguaugagucuu

SEQ ID NO: 12124 - DNA, 21 bp, Homo sapiens
cataccacacttacaattaag

SEQ ID NO: 12125 - RNA, 21 nt, RNAi-sense strand
uaccacacuuacaauuaaguu

SEQ ID NO: 12126 - RNA, 21 nt, RNAi-antisense strand
cuuaauuguaagugugguauu

SEQ ID NO: 12127 - DNA, 21 bp, Homo sapiens
cacacttacaattaaggtcaa

SEQ ID NO: 12128 - RNA, 21 nt, RNAi-sense strand
cacuuacaauuaaggucaauu

SEQ ID NO: 12129 - RNA, 21 nt, RNAi-antisense strand
uugaccuuaauuguaaguguu

SEQ ID NO: 12130 - DNA, 21 bp, Homo sapiens
cacttacaattaaggtcaagc

SEQ ID NO: 12131 - RNA, 21 nt, RNAi-sense strand
cuuacaauuaaggucaagcuu

SEQ ID NO: 12132 - RNA, 21 nt, RNAi-antisense strand
gcuugaccuuaauuguaaguu

SEQ ID NO: 12133 - DNA, 21 bp, Homo sapiens
caagtccattatctaatagtg

SEQ ID NO: 12134 - RNA, 21 nt, RNAi-sense strand
aguccauuaucuaauaguguu

SEQ ID NO: 12135 - RNA, 21 nt, RNAi-antisense strand
cacuauuagauaauggacuuu

SEQ ID NO: 12136 - DNA, 21 bp, Homo sapiens
cattatctaatagtgacagca

SEQ ID NO: 12137 - RNA, 21 nt, RNAi-sense strand
uuaucuaauagugacagcauu

SEQ ID NO: 12138 - RNA, 21 nt, RNAi-antisense strand
ugcugucacuauuagauaauu

SEQ ID NO: 12139 - DNA, 21 bp, Homo sapiens
cacagtctttccgtgtgattg

SEQ ID NO: 12140 - RNA, 21 nt, RNAi-sense strand
cagucuuuccgugugauuguu

SEQ ID NO: 12141 - RNA, 21 nt, RNAi-antisense strand
caaucacacggaaagacuguu

SEQ ID NO: 12142 - DNA, 21 bp, Homo sapiens
cagtctttccgtgtgattgtc

SEQ ID NO: 12143 - RNA, 21 nt, RNAi-sense strand
gucuuuccgugugauugucuu

SEQ ID NO: 12144 - RNA, 21 nt, RNAi-antisense strand
gacaaucacacggaaagacuu

SEQ ID NO: 12145 - DNA, 21 bp, Homo sapiens
caaagtttcggttcctatgag

SEQ ID NO: 12146 - RNA, 21 nt, RNAi-sense strand
aaguuucgguuccuaugaguu

SEQ ID NO: 12147 - RNA, 21 nt, RNAi-antisense strand
cucauaggaaccgaaacuuuu

SEQ ID NO: 12148 - DNA, 21 bp, Homo sapiens
cagcctgtgcctgcctttgtg

SEQ ID NO: 12149 - RNA, 21 nt, RNAi-sense strand
gccugugccugccuuuguguu

SEQ ID NO: 12150 - RNA, 21 nt, RNAi-antisense strand
cacaaaggcaggcacaggcuu

SEQ ID NO: 12151 - DNA, 21 bp, Homo sapiens
cacagtgagcctgagagagac

SEQ ID NO: 12152 - RNA, 21 nt, RNAi-sense strand
cagugagccugagagagacuu

SEQ ID NO: 12153 - RNA, 21 nt, RNAi-antisense strand
gucucucucaggcucacuguu

SEQ ID NO: 12154 - DNA, 21 bp, Homo sapiens
cagtgagcctgagagagacgg

SEQ ID NO: 12155 - RNA, 21 nt, RNAi-sense strand
gugagccugagagagacgguu

SEQ ID NO: 12156 - RNA, 21 nt, RNAi-antisense strand
ccgucucucucaggcucacuu

SEQ ID NO: 12157 - DNA, 21 bp, Homo sapiens
cagtccagcaaattgctagtc

SEQ ID NO: 12158 - RNA, 21 nt, RNAi-sense strand
guccagcaaauugcuagucuu

SEQ ID NO: 12159 - RNA, 21 nt, RNAi-antisense strand
gacuagcaauuugcuggacuu

SEQ ID NO: 12160 - DNA, 21 bp, Homo sapiens
cagtctacattgagcatttga

SEQ ID NO: 12161 - RNA, 21 nt, RNAi-sense strand
gucuacauugagcauuugauu

SEQ ID NO: 12162 - RNA, 21 nt, RNAi-antisense strand
ucaaaugcucaauguagacuu

SEQ ID NO: 12163 - DNA, 21 bp, Homo sapiens
cattgagcatttgaaaggtgt

SEQ ID NO: 12164 - RNA, 21 nt, RNAi-sense strand
uugagcauuugaaagguguuu

SEQ ID NO: 12165 - RNA, 21 nt, RNAi-antisense strand
acaccuuucaaaugcucaauu

SEQ ID NO: 12166 - DNA, 21 bp, Homo sapiens
catttgaaaggtgtgctagaa

SEQ ID NO: 12167 - RNA, 21 nt, RNAi-sense strand
uuugaaaggugugcuagaauu

SEQ ID NO: 12168 - RNA, 21 nt, RNAi-antisense strand
uucuagcacaccuuucaaauu

SEQ ID NO: 12169 - DNA, 21 bp, Homo sapiens
caaggtctcctgatccgtccg

SEQ ID NO: 12170 - RNA, 21 nt, RNAi-sense strand
aggucuccugauccguccguu

SEQ ID NO: 12171 - RNA, 21 nt, RNAi-antisense strand
cggacggaucaggagaccuuu

SEQ ID NO: 12172 - DNA, 21 bp, Homo sapiens
catttcctttgaacttgattg

SEQ ID NO: 12173 - RNA, 21 nt, RNAi-sense strand
uuuccuuugaacuugauuguu

SEQ ID NO: 12174 - RNA, 21 nt, RNAi-antisense strand
caaucaaguucaaaggaaauu

SEQ ID NO: 12175 - DNA, 21 bp, Homo sapiens
caaagaaattcagaacagcct

SEQ ID NO: 12176 - RNA, 21 nt, RNAi-sense strand
aagaaauucagaacagccuuu

SEQ ID NO: 12177 - RNA, 21 nt, RNAi-antisense strand
aggcuguucugaauuucuuuu

SEQ ID NO: 12178 - DNA, 21 bp, Homo sapiens
catttctgcagatggaaagtt

SEQ ID NO: 12179 - RNA, 21 nt, RNAi-sense strand
uuucugcagauggaaaguuuu

SEQ ID NO: 12180 - RNA, 21 nt, RNAi-antisense strand
aacuuuccaucugcagaaauu

SEQ ID NO: 12181 - DNA, 21 bp, Homo sapiens
catccagcgagagagtttcaa

SEQ ID NO: 12182 - RNA, 21 nt, RNAi-sense strand
uccagcgagagaguuucaauu

SEQ ID NO: 12183 - RNA, 21 nt, RNAi-antisense strand
uugaaacucucucgcuggauu

SEQ ID NO: 12184 - DNA, 21 bp, Homo sapiens
cagcgatgtatataagccagt

SEQ ID NO: 12185 - RNA, 21 nt, RNAi-sense strand
gcgauguauauaagccaguuu

SEQ ID NO: 12186 - RNA, 21 nt, RNAi-antisense strand
acuggcuuauauacaucgcuu

SEQ ID NO: 12187 - DNA, 21 bp, Homo sapiens
cagttcacttagacaacttta

SEQ ID NO: 12188 - RNA, 21 nt, RNAi-sense strand
guucacuuagacaacuuuauu

SEQ ID NO: 12189 - RNA, 21 nt, RNAi-antisense strand
uaaaguugucuaagugaacuu

SEQ ID NO: 12190 - DNA, 21 bp, Homo sapiens
caatgtacaggaagtagttct

SEQ ID NO: 12191 - RNA, 21 nt, RNAi-sense strand
auguacaggaaguaguucuuu

SEQ ID NO: 12192 - RNA, 21 nt, RNAi-antisense strand
agaacuacuuccuguacauuu

SEQ ID NO: 12193 - DNA, 21 bp, Homo sapiens
caaagccggattcttaattct

SEQ ID NO: 12194 - RNA, 21 nt, RNAi-sense strand
aagccggauucuuaauucuuu

SEQ ID NO: 12195 - RNA, 21 nt, RNAi-antisense strand
agaauuaagaauccggcuuuu

SEQ ID NO: 12196 - DNA, 21 bp, Homo sapiens
caacactttgaggacatttat

SEQ ID NO: 12197 - RNA, 21 nt, RNAi-sense strand
acacuuugaggacauuuauuu

SEQ ID NO: 12198 - RNA, 21 nt, RNAi-antisense strand
auaaauguccucaaaguguuu

SEQ ID NO: 12199 - DNA, 21 bp, Homo sapiens
cactttgaggacatttatgat

SEQ ID NO: 12200 - RNA, 21 nt, RNAi-sense strand
cuuugaggacauuuaugauuu

SEQ ID NO: 12201 - RNA, 21 nt, RNAi-antisense strand
aucauaaauguccucaaaguu

SEQ ID NO: 12202 - DNA, 21 bp, Homo sapiens
cagtgaggatgctgcagtgag

SEQ ID NO: 12203 - RNA, 21 nt, RNAi-sense strand
gugaggaugcugcagugaguu

SEQ ID NO: 12204 - RNA, 21 nt, RNAi-antisense strand
cucacugcagcauccucacuu

SEQ ID NO: 12205 - DNA, 21 bp, Homo sapiens
cagtgaggctgtaaagtggcc

SEQ ID NO: 12206 - RNA, 21 nt, RNAi-sense strand
gugaggcuguaaaguggccuu

SEQ ID NO: 12207 - RNA, 21 nt, RNAi-antisense strand
ggccacuuuacagccucacuu

SEQ ID NO: 12208 - DNA, 21 bp, Homo sapiens
cacagttagtgatcctgtcct

SEQ ID NO: 12209 - RNA, 21 nt, RNAi-sense strand
caguuagugauccuguccuuu

SEQ ID NO: 12210 - RNA, 21 nt, RNAi-antisense strand
aggacaggaucacuaacuguu

SEQ ID NO: 12211 - DNA, 21 bp, Homo sapiens
cagttagtgatcctgtccttt

SEQ ID NO: 12212 - RNA, 21 nt, RNAi-sense strand
guuagugauccuguccuuuuu

SEQ ID NO: 12213 - RNA, 21 nt, RNAi-antisense strand
aaaggacaggaucacuaacuu

SEQ ID NO: 12214 - DNA, 21 bp, Homo sapiens
caaactgaaattcagagcaag

SEQ ID NO: 12215 - RNA, 21 nt, RNAi-sense strand
aacugaaauucagagcaaguu

SEQ ID NO: 12216 - RNA, 21 nt, RNAi-antisense strand
cuugcucugaauuucaguuuu

SEQ ID NO: 12217 - DNA, 21 bp, Homo sapiens
cagagcaagttcctgagtgcg

SEQ ID NO: 12218 - RNA, 21 nt, RNAi-sense strand
gagcaaguuccugagugcguu

SEQ ID NO: 12219 - RNA, 21 nt, RNAi-antisense strand
cgcacucaggaacuugcucuu

SEQ ID NO: 12220 - DNA, 21 bp, Homo sapiens
caagttcctgagtgcgtggat

SEQ ID NO: 12221 - RNA, 21 nt, RNAi-sense strand
aguuccugagugcguggauuu

SEQ ID NO: 12222 - RNA, 21 nt, RNAi-antisense strand
auccacgcacucaggaacuuu

SEQ ID NO: 12223 - DNA, 21 bp, Homo sapiens
cactcaagagttcagtgctca

SEQ ID NO: 12224 - RNA, 21 nt, RNAi-sense strand
cucaagaguucagugcucauu

SEQ ID NO: 12225 - RNA, 21 nt, RNAi-antisense strand
ugagcacugaacucuugaguu

SEQ ID NO: 12226 - DNA, 21 bp, Homo sapiens
caagagttcagtgctcatacg

SEQ ID NO: 12227 - RNA, 21 nt, RNAi-sense strand
agaguucagugcucauacguu

SEQ ID NO: 12228 - RNA, 21 nt, RNAi-antisense strand
cguaugagcacugaacucuuu

SEQ ID NO: 12229 - DNA, 21 bp, Homo sapiens
cagtgctcatacgtatctgct

SEQ ID NO: 12230 - RNA, 21 nt, RNAi-sense strand
gugcucauacguaucugcuuu

SEQ ID NO: 12231 - RNA, 21 nt, RNAi-antisense strand
agcagauacguaugagcacuu

SEQ ID NO: 12232 - DNA, 21 bp, Homo sapiens
caaagtgcctcatgcaaccgg

SEQ ID NO: 12233 - RNA, 21 nt, RNAi-sense strand
aagugccucaugcaaccgguu

SEQ ID NO: 12234 - RNA, 21 nt, RNAi-antisense strand
ccgguugcaugaggcacuuuu

SEQ ID NO: 12235 - DNA, 21 bp, Homo sapiens
cataagtagttaccacagaat

SEQ ID NO: 12236 - RNA, 21 nt, RNAi-sense strand
uaaguaguuaccacagaauuu

SEQ ID NO: 12237 - RNA, 21 nt, RNAi-antisense strand
auucugugguaacuacuuauu

SEQ ID NO: 12238 - DNA, 21 bp, Homo sapiens
cacagaatacggaagagcagg

SEQ ID NO: 12239 - RNA, 21 nt, RNAi-sense strand
cagaauacggaagagcagguu

SEQ ID NO: 12240 - RNA, 21 nt, RNAi-antisense strand
ccugcucuuccguauucuguu

SEQ ID NO: 12241 - DNA, 21 bp, Homo sapiens
cagaatacggaagagcaggtg

SEQ ID NO: 12242 - RNA, 21 nt, RNAi-sense strand
gaauacggaagagcagguguu

SEQ ID NO: 12243 - RNA, 21 nt, RNAi-antisense strand
caccugcucuuccguauucuu

SEQ ID NO: 12244 - DNA, 21 bp, Homo sapiens
caggtgactgtgctgtgcagc

SEQ ID NO: 12245 - RNA, 21 nt, RNAi-sense strand
ggugacugugcugugcagcuu

SEQ ID NO: 12246 - RNA, 21 nt, RNAi-antisense strand
gcugcacagcacagucaccuu

SEQ ID NO: 12247 - DNA, 21 bp, Homo sapiens
caggtaggaagcaacagcttc

SEQ ID NO: 12248 - RNA, 21 nt, RNAi-sense strand
gguaggaagcaacagcuucuu

SEQ ID NO: 12249 - RNA, 21 nt, RNAi-antisense strand
gaagcuguugcuuccuaccuu

SEQ ID NO: 12250 - DNA, 21 bp, Homo sapiens
caacagcttcagaaagagctc

SEQ ID NO: 12251 - RNA, 21 nt, RNAi-sense strand
acagcuucagaaagagcucuu

SEQ ID NO: 12252 - RNA, 21 nt, RNAi-antisense strand
gagcucuuucugaagcuguuu

SEQ ID NO: 12253 - DNA, 21 bp, Homo sapiens
cagcttcagaaagagctcaaa

SEQ ID NO: 12254 - RNA, 21 nt, RNAi-sense strand
gcuucagaaagagcucaaauu

SEQ ID NO: 12255 - RNA, 21 nt, RNAi-antisense strand
uuugagcucuuucugaagcuu

SEQ ID NO: 12256 - DNA, 21 bp, Homo sapiens
caggaccttgagtgtcattag

SEQ ID NO: 12257 - RNA, 21 nt, RNAi-sense strand
ggaccuugagugucauuaguu

SEQ ID NO: 12258 - RNA, 21 nt, RNAi-antisense strand
cuaaugacacucaagguccuu

SEQ ID NO: 12259 - DNA, 21 bp, Homo sapiens
catagcagctttgtctctgtc

SEQ ID NO: 12260 - RNA, 21 nt, RNAi-sense strand
uagcagcuuugucucugucuu

SEQ ID NO: 12261 - RNA, 21 nt, RNAi-antisense strand
gacagagacaaagcugcuauu

SEQ ID NO: 12262 - DNA, 21 bp, Homo sapiens
cagctttgtctctgtcacatc

SEQ ID NO: 12263 - RNA, 21 nt, RNAi-sense strand
gcuuugucucugucacaucuu

SEQ ID NO: 12264 - RNA, 21 nt, RNAi-antisense strand
gaugugacagagacaaagcuu

SEQ ID NO: 12265 - DNA, 21 bp, Homo sapiens
cacatcagcaatttcagaacc

SEQ ID NO: 12266 - RNA, 21 nt, RNAi-sense strand
caucagcaauuucagaaccuu

SEQ ID NO: 12267 - RNA, 21 nt, RNAi-antisense strand
gguucugaaauugcugauguu

SEQ ID NO: 12268 - DNA, 21 bp, Homo sapiens
catcagcaatttcagaaccaa

SEQ ID NO: 12269 - RNA, 21 nt, RNAi-sense strand
ucagcaauuucagaaccaauu

SEQ ID NO: 12270 - RNA, 21 nt, RNAi-antisense strand
uugguucugaaauugcugauu

SEQ ID NO: 12271 - DNA, 21 bp, Homo sapiens
cacagagctgcactatcacga

SEQ ID NO: 12272 - RNA, 21 nt, RNAi-sense strand
cagagcugcacuaucacgauu

SEQ ID NO: 12273 - RNA, 21 nt, RNAi-antisense strand
ucgugauagugcagcucuguu

SEQ ID NO: 12274 - DNA, 21 bp, Homo sapiens
cagagctgcactatcacgagc

SEQ ID NO: 12275 - RNA, 21 nt, RNAi-sense strand
gagcugcacuaucacgagcuu

SEQ ID NO: 12276 - RNA, 21 nt, RNAi-antisense strand
gcucgugauagugcagcucuu

SEQ ID NO: 12277 - DNA, 21 bp, Homo sapiens
cactatcacgagcctttgttt

SEQ ID NO: 12278 - RNA, 21 nt, RNAi-sense strand
cuaucacgagccuuuguuuuu

SEQ ID NO: 12279 - RNA, 21 nt, RNAi-antisense strand
aaacaaaggcucgugauaguu

SEQ ID NO: 12280 - DNA, 21 bp, Homo sapiens
caatgtgcagactgattggcc

SEQ ID NO: 12281 - RNA, 21 nt, RNAi-sense strand
augugcagacugauuggccuu

SEQ ID NO: 12282 - RNA, 21 nt, RNAi-antisense strand
ggccaaucagucugcacauuu

SEQ ID NO: 12283 - DNA, 21 bp, Homo sapiens
cagactgattggcctggtcat

SEQ ID NO: 12284 - RNA, 21 nt, RNAi-sense strand
gacugauuggccuggucauuu

SEQ ID NO: 12285 - RNA, 21 nt, RNAi-antisense strand
augaccaggccaaucagucuu

SEQ ID NO: 12286 - DNA, 21 bp, Homo sapiens
cattggtctccgagagaggag

SEQ ID NO: 12287 - RNA, 21 nt, RNAi-sense strand
uuggucuccgagagaggaguu

SEQ ID NO: 12288 - RNA, 21 nt, RNAi-antisense strand
cuccucucucggagaccaauu

SEQ ID NO: 12289 - DNA, 21 bp, Homo sapiens
caataatcattctggatagag

SEQ ID NO: 12290 - RNA, 21 nt, RNAi-sense strand
auaaucauucuggauagaguu

SEQ ID NO: 12291 - RNA, 21 nt, RNAi-antisense strand
cucuauccagaaugauuauuu

SEQ ID NO: 12292 - DNA, 21 bp, Homo sapiens
cagaactcagttaaatctttg

SEQ ID NO: 12293 - RNA, 21 nt, RNAi-sense strand
gaacucaguuaaaucuuuguu

SEQ ID NO: 12294 - RNA, 21 nt, RNAi-antisense strand
caaagauuuaacugaguucuu

SEQ ID NO: 12295 - DNA, 21 bp, Homo sapiens
cacttggctcttggtacctgt

SEQ ID NO: 12296 - RNA, 21 nt, RNAi-sense strand
cuuggcucuugguaccuguuu

SEQ ID NO: 12297 - RNA, 21 nt, RNAi-antisense strand
acagguaccaagagccaaguu

SEQ ID NO: 12298 - DNA, 21 bp, Homo sapiens
caatcagagctccagtttgca

SEQ ID NO: 12299 - RNA, 21 nt, RNAi-sense strand
aucagagcuccaguuugcauu

SEQ ID NO: 12300 - RNA, 21 nt, RNAi-antisense strand
ugcaaacuggagcucugauuu

SEQ ID NO: 12301 - DNA, 21 bp, Homo sapiens
cagagctccagtttgcatttg

SEQ ID NO: 12302 - RNA, 21 nt, RNAi-sense strand
gagcuccaguuugcauuuguu

SEQ ID NO: 12303 - RNA, 21 nt, RNAi-antisense strand
caaaugcaaacuggagcucuu

SEQ ID NO: 12304 - DNA, 21 bp, Homo sapiens
cagtttgcatttggatgtgta

SEQ ID NO: 12305 - RNA, 21 nt, RNAi-sense strand
guuugcauuuggauguguauu

SEQ ID NO: 12306 - RNA, 21 nt, RNAi-antisense strand
uacacauccaaaugcaaacuu

SEQ ID NO: 12307 - DNA, 21 bp, Homo sapiens
catcagactctgagtaactgg

SEQ ID NO: 12308 - RNA, 21 nt, RNAi-sense strand
ucagacucugaguaacugguu

SEQ ID NO: 12309 - RNA, 21 nt, RNAi-antisense strand
ccaguuacucagagucugauu

SEQ ID NO: 12310 - DNA, 21 bp, Homo sapiens
cagactctgagtaactggttg

SEQ ID NO: 12311 - RNA, 21 nt, RNAi-sense strand
gacucugaguaacugguuguu

SEQ ID NO: 12312 - RNA, 21 nt, RNAi-antisense strand
caaccaguuacucagagucuu

SEQ ID NO: 12313 - DNA, 21 bp, Homo sapiens
cataacttcatagatgcagga

SEQ ID NO: 12314 - RNA, 21 nt, RNAi-sense strand
uaacuucauagaugcaggauu

SEQ ID NO: 12315 - RNA, 21 nt, RNAi-antisense strand
uccugcaucuaugaaguuauu

SEQ ID NO: 12316 - DNA, 21 bp, Homo sapiens
catagatgcaggaggctcagg

SEQ ID NO: 12317 - RNA, 21 nt, RNAi-sense strand
uagaugcaggaggcucagguu

SEQ ID NO: 12318 - RNA, 21 nt, RNAi-antisense strand
ccugagccuccugcaucuauu

SEQ ID NO: 12319 - DNA, 21 bp, Homo sapiens
caggaggctcaggtgatctgt

SEQ ID NO: 12320 - RNA, 21 nt, RNAi-sense strand
ggaggcucaggugaucuguuu

SEQ ID NO: 12321 - RNA, 21 nt, RNAi-antisense strand
acagaucaccugagccuccuu

SEQ ID NO: 12322 - DNA, 21 bp, Homo sapiens
caggtgatctgtttgaggaga

SEQ ID NO: 12323 - RNA, 21 nt, RNAi-sense strand
ggugaucuguuugaggagauu

SEQ ID NO: 12324 - RNA, 21 nt, RNAi-antisense strand
ucuccucaaacagaucaccuu

SEQ ID NO: 12325 - DNA, 21 bp, Homo sapiens
catactggccgttctgacctg

SEQ ID NO: 12326 - RNA, 21 nt, RNAi-sense strand
uacuggccguucugaccuguu

SEQ ID NO: 12327 - RNA, 21 nt, RNAi-antisense strand
caggucagaacggccaguauu

SEQ ID NO: 12328 - DNA, 21 bp, Homo sapiens
cagcagatacacaggacatgg

SEQ ID NO: 12329 - RNA, 21 nt, RNAi-sense strand
gcagauacacaggacaugguu

SEQ ID NO: 12330 - RNA, 21 nt, RNAi-antisense strand
ccauguccuguguaucugcuu

SEQ ID NO: 12331 - DNA, 21 bp, Homo sapiens
cagatacacaggacatggatg

SEQ ID NO: 12332 - RNA, 21 nt, RNAi-sense strand
gauacacaggacauggauguu

SEQ ID NO: 12333 - RNA, 21 nt, RNAi-antisense strand
cauccauguccuguguaucuu

SEQ ID NO: 12334 - DNA, 21 bp, Homo sapiens
cacaggacatggatgaaattc

SEQ ID NO: 12335 - RNA, 21 nt, RNAi-sense strand
caggacauggaugaaauucuu

SEQ ID NO: 12336 - RNA, 21 nt, RNAi-antisense strand
gaauuucauccauguccuguu

SEQ ID NO: 12337 - DNA, 21 bp, Homo sapiens
cattccatttcatttgtgttg

SEQ ID NO: 12338 - RNA, 21 nt, RNAi-sense strand
uuccauuucauuuguguuguu

SEQ ID NO: 12339 - RNA, 21 nt, RNAi-antisense strand
caacacaaaugaaauggaauu

SEQ ID NO: 12340 - DNA, 21 bp, Homo sapiens
cagccatgtatcaatattcac

SEQ ID NO: 12341 - RNA, 21 nt, RNAi-sense strand
gccauguaucaauauucacuu

SEQ ID NO: 12342 - RNA, 21 nt, RNAi-antisense strand
gugaauauugauacauggcuu

SEQ ID NO: 12343 - DNA, 21 bp, Homo sapiens
gagtacgactacgtgagcttc

SEQ ID NO: 12344 - RNA, 21 nt, RNAi-sense strand
guacgacuacgugagcuucuu

SEQ ID NO: 12345 - RNA, 21 nt, RNAi-antisense strand
gaagcucacguagucguacuu

SEQ ID NO: 12346 - DNA, 21 bp, Homo sapiens
gactacgtgagcttccagtcg

SEQ ID NO: 12347 - RNA, 21 nt, RNAi-sense strand
cuacgugagcuuccagucguu

SEQ ID NO: 12348 - RNA, 21 nt, RNAi-antisense strand
cgacuggaagcucacguaguu

SEQ ID NO: 12349 - DNA, 21 bp, Homo sapiens
gagcttccagtcggacatcgg

SEQ ID NO: 12350 - RNA, 21 nt, RNAi-sense strand
gcuuccagucggacaucgguu

SEQ ID NO: 12351 - RNA, 21 nt, RNAi-antisense strand
ccgauguccgacuggaagcuu

SEQ ID NO: 12352 - DNA, 21 bp, Homo sapiens
gagaccatggcggaggtgaag

SEQ ID NO: 12353 - RNA, 21 nt, RNAi-sense strand
gaccauggcggaggugaaguu

SEQ ID NO: 12354 - RNA, 21 nt, RNAi-antisense strand
cuucaccuccgccauggucuu

SEQ ID NO: 12355 - DNA, 21 bp, Homo sapiens
gaccatggcggaggtgaagca

SEQ ID NO: 12356 - RNA, 21 nt, RNAi-sense strand
ccauggcggaggugaagcauu

SEQ ID NO: 12357 - RNA, 21 nt, RNAi-antisense strand
ugcuucaccuccgccaugguu

SEQ ID NO: 12358 - DNA, 21 bp, Homo sapiens
gagccggtcatgcagttcttc

SEQ ID NO: 12359 - RNA, 21 nt, RNAi-sense strand
gccggucaugcaguucuucuu

SEQ ID NO: 12360 - RNA, 21 nt, RNAi-antisense strand
gaagaacugcaugaccggcuu

SEQ ID NO: 12361 - DNA, 21 bp, Homo sapiens
gagatgcttaagtgtgacaag

SEQ ID NO: 12362 - RNA, 21 nt, RNAi-sense strand
gaugcuuaagugugacaaguu

SEQ ID NO: 12363 - RNA, 21 nt, RNAi-antisense strand
cuugucacacuuaagcaucuu

SEQ ID NO: 12364 - DNA, 21 bp, Homo sapiens
gatgcttaagtgtgacaagtt

SEQ ID NO: 12365 - RNA, 21 nt, RNAi-sense strand
ugcuuaagugugacaaguuuu

SEQ ID NO: 12366 - RNA, 21 nt, RNAi-antisense strand
aacuugucacacuuaagcauu

SEQ ID NO: 12367 - DNA, 21 bp, Homo sapiens
gacgtctgcatcgccatgacg

SEQ ID NO: 12368 - RNA, 21 nt, RNAi-sense strand
cgucugcaucgccaugacguu

SEQ ID NO: 12369 - RNA, 21 nt, RNAi-antisense strand
cgucauggcgaugcagacguu

SEQ ID NO: 12370 - DNA, 21 bp, Homo sapiens
gacaacgagttgaaatctgag

SEQ ID NO: 12371 - RNA, 21 nt, RNAi-sense strand
caacgaguugaaaucugaguu

SEQ ID NO: 12372 - RNA, 21 nt, RNAi-antisense strand
cucagauuucaacucguuguu

SEQ ID NO: 12373 - DNA, 21 bp, Homo sapiens
gagttgaaatctgaggccatc

SEQ ID NO: 12374 - RNA, 21 nt, RNAi-sense strand
guugaaaucugaggccaucuu

SEQ ID NO: 12375 - RNA, 21 nt, RNAi-antisense strand
gauggccucagauuucaacuu

SEQ ID NO: 12376 - DNA, 21 bp, Homo sapiens
gaaatctgaggccatcattga

SEQ ID NO: 12377 - RNA, 21 nt, RNAi-sense strand
aaucugaggccaucauugauu

SEQ ID NO: 12378 - RNA, 21 nt, RNAi-antisense strand
ucaaugauggccucagauuuu

SEQ ID NO: 12379 - DNA, 21 bp, Homo sapiens
gaggccatcattgaacatctc

SEQ ID NO: 12380 - RNA, 21 nt, RNAi-sense strand
ggccaucauugaacaucucuu

SEQ ID NO: 12381 - RNA, 21 nt, RNAi-antisense strand
gagauguucaaugauggccuu

SEQ ID NO: 12382 - DNA, 21 bp, Homo sapiens
gaacatctctgtgccagcgag

SEQ ID NO: 12383 - RNA, 21 nt, RNAi-sense strand
acaucucugugccagcgaguu

SEQ ID NO: 12384 - RNA, 21 nt, RNAi-antisense strand
cucgcuggcacagagauguuu

SEQ ID NO: 12385 - DNA, 21 bp, Homo sapiens
gagtttgcactgaggatgaaa

SEQ ID NO: 12386 - RNA, 21 nt, RNAi-sense strand
guuugcacugaggaugaaauu

SEQ ID NO: 12387 - RNA, 21 nt, RNAi-antisense strand
uuucauccucagugcaaacuu

SEQ ID NO: 12388 - DNA, 21 bp, Homo sapiens
gaagaaggacctgaagaagct

SEQ ID NO: 12389 - RNA, 21 nt, RNAi-sense strand
agaaggaccugaagaagcuuu

SEQ ID NO: 12390 - RNA, 21 nt, RNAi-antisense strand
agcuucuucagguccuucuuu

SEQ ID NO: 12391 - DNA, 21 bp, Homo sapiens
gaaggacctgaagaagcttgt

SEQ ID NO: 12392 - RNA, 21 nt, RNAi-sense strand
aggaccugaagaagcuuguuu

SEQ ID NO: 12393 - RNA, 21 nt, RNAi-antisense strand
acaagcuucuucagguccuuu

SEQ ID NO: 12394 - DNA, 21 bp, Homo sapiens
gacctgaagaagcttgtgctg

SEQ ID NO: 12395 - RNA, 21 nt, RNAi-sense strand
ccugaagaagcuugugcuguu

SEQ ID NO: 12396 - RNA, 21 nt, RNAi-antisense strand
cagcacaagcuucuucagguu

SEQ ID NO: 12397 - DNA, 21 bp, Homo sapiens
gaagaagcttgtgctgtacct

SEQ ID NO: 12398 - RNA, 21 nt, RNAi-sense strand
agaagcuugugcuguaccuuu

SEQ ID NO: 12399 - RNA, 21 nt, RNAi-antisense strand
agguacagcacaagcuucuuu

SEQ ID NO: 12400 - DNA, 21 bp, Homo sapiens
gaagcttgtgctgtacctgaa

SEQ ID NO: 12401 - RNA, 21 nt, RNAi-sense strand
agcuugugcuguaccugaauu

SEQ ID NO: 12402 - RNA, 21 nt, RNAi-antisense strand
uucagguacagcacaagcuuu

SEQ ID NO: 12403 - DNA, 21 bp, Homo sapiens
gacaacctcagccaccacttc

SEQ ID NO: 12404 - RNA, 21 nt, RNAi-sense strand
caaccucagccaccacuucuu

SEQ ID NO: 12405 - RNA, 21 nt, RNAi-antisense strand
gaagugguggcugagguuguu

SEQ ID NO: 12406 - DNA, 21 bp, Homo sapiens
gaagagccagtacttgctgac

SEQ ID NO: 12407 - RNA, 21 nt, RNAi-sense strand
agagccaguacuugcugacuu

SEQ ID NO: 12408 - RNA, 21 nt, RNAi-antisense strand
gucagcaaguacuggcucuuu

SEQ ID NO: 12409 - DNA, 21 bp, Homo sapiens
gagccagtacttgctgacggc

SEQ ID NO: 12410 - RNA, 21 nt, RNAi-sense strand
gccaguacuugcugacggcuu

SEQ ID NO: 12411 - RNA, 21 nt, RNAi-antisense strand
gccgucagcaaguacuggcuu

SEQ ID NO: 12412 - DNA, 21 bp, Homo sapiens
gacattgtaatccagtcggct

SEQ ID NO: 12413 - RNA, 21 nt, RNAi-sense strand
cauuguaauccagucggcuuu

SEQ ID NO: 12414 - RNA, 21 nt, RNAi-antisense strand
agccgacuggauuacaauguu

SEQ ID NO: 12415 - DNA, 21 bp, Homo sapiens
gatccgcaatgtggagcagca

SEQ ID NO: 12416 - RNA, 21 nt, RNAi-sense strand
uccgcaauguggagcagcauu

SEQ ID NO: 12417 - RNA, 21 nt, RNAi-antisense strand
ugcugcuccacauugcggauu

SEQ ID NO: 12418 - DNA, 21 bp, Homo sapiens
gaggaggtgacaaaccatttc

SEQ ID NO: 12419 - RNA, 21 nt, RNAi-sense strand
ggaggugacaaaccauuucuu

SEQ ID NO: 12420 - RNA, 21 nt, RNAi-antisense strand
gaaaugguuugucaccuccuu

SEQ ID NO: 12421 - DNA, 21 bp, Homo sapiens
gaggtgacaaaccatttccaa

SEQ ID NO: 12422 - RNA, 21 nt, RNAi-sense strand
ggugacaaaccauuuccaauu

SEQ ID NO: 12423 - RNA, 21 nt, RNAi-antisense strand
uuggaaaugguuugucaccuu

SEQ ID NO: 12424 - DNA, 21 bp, Homo sapiens
gacaaaccatttccaacagca

SEQ ID NO: 12425 - RNA, 21 nt, RNAi-sense strand
caaaccauuuccaacagcauu

SEQ ID NO: 12426 - RNA, 21 nt, RNAi-antisense strand
ugcuguuggaaaugguuuguu

SEQ ID NO: 12427 - DNA, 21 bp, Homo sapiens
gaaagtgagagccagcagcaa

SEQ ID NO: 12428 - RNA, 21 nt, RNAi-sense strand
aagugagagccagcagcaauu

SEQ ID NO: 12429 - RNA, 21 nt, RNAi-antisense strand
uugcugcuggcucucacuuuu

SEQ ID NO: 12430 - DNA, 21 bp, Homo sapiens
gatctattggctgatctatgc

SEQ ID NO: 12431 - RNA, 21 nt, RNAi-sense strand
ucuauuggcugaucuaugcuu

SEQ ID NO: 12432 - RNA, 21 nt, RNAi-antisense strand
gcauagaucagccaauagauu

SEQ ID NO: 12433 - DNA, 21 bp, Homo sapiens
gatctatgcctttcaactaga

SEQ ID NO: 12434 - RNA, 21 nt, RNAi-sense strand
ucuaugccuuucaacuagauu

SEQ ID NO: 12435 - RNA, 21 nt, RNAi-antisense strand
ucuaguugaaaggcauagauu

SEQ ID NO: 12436 - DNA, 21 bp, Homo sapiens
gattggcaagtcacgttgttt

SEQ ID NO: 12437 - RNA, 21 nt, RNAi-sense strand
uuggcaagucacguuguuuuu

SEQ ID NO: 12438 - RNA, 21 nt, RNAi-antisense strand
aaacaacgugacuugccaauu

SEQ ID NO: 12439 - DNA, 21 bp, Homo sapiens
gagtagtttctttctgtctgc

SEQ ID NO: 12440 - RNA, 21 nt, RNAi-sense strand
guaguuucuuucugucugcuu

SEQ ID NO: 12441 - RNA, 21 nt, RNAi-antisense strand
gcagacagaaagaaacuacuu

SEQ ID NO: 12442 - DNA, 21 bp, Homo sapiens
gaaacagactcataccacact

SEQ ID NO: 12443 - RNA, 21 nt, RNAi-sense strand
aacagacucauaccacacuuu

SEQ ID NO: 12444 - RNA, 21 nt, RNAi-antisense strand
agugugguaugagucuguuuu

SEQ ID NO: 12445 - DNA, 21 bp, Homo sapiens
gactcataccacacttacaat

SEQ ID NO: 12446 - RNA, 21 nt, RNAi-sense strand
cucauaccacacuuacaauuu

SEQ ID NO: 12447 - RNA, 21 nt, RNAi-antisense strand
auuguaagugugguaugaguu

SEQ ID NO: 12448 - DNA, 21 bp, Homo sapiens
gagaggcattgccttctctgc

SEQ ID NO: 12449 - RNA, 21 nt, RNAi-sense strand
gaggcauugccuucucugcuu

SEQ ID NO: 12450 - RNA, 21 nt, RNAi-antisense strand
gcagagaaggcaaugccucuu

SEQ ID NO: 12451 - DNA, 21 bp, Homo sapiens
gattgtctttgaatctgaatc

SEQ ID NO: 12452 - RNA, 21 nt, RNAi-sense strand
uugucuuugaaucugaaucuu

SEQ ID NO: 12453 - RNA, 21 nt, RNAi-antisense strand
gauucagauucaaagacaauu

SEQ ID NO: 12454 - DNA, 21 bp, Homo sapiens
gaatctgaatcagccagtctc

SEQ ID NO: 12455 - RNA, 21 nt, RNAi-sense strand
aucugaaucagccagucucuu

SEQ ID NO: 12456 - RNA, 21 nt, RNAi-antisense strand
gagacuggcugauucagauuu

SEQ ID NO: 12457 - DNA, 21 bp, Homo sapiens
gaatcagccagtctcagatgc

SEQ ID NO: 12458 - RNA, 21 nt, RNAi-sense strand
aucagccagucucagaugcuu

SEQ ID NO: 12459 - RNA, 21 nt, RNAi-antisense strand
gcaucugagacuggcugauuu

SEQ ID NO: 12460 - DNA, 21 bp, Homo sapiens
gaaaccacagtgagcctgaga

SEQ ID NO: 12461 - RNA, 21 nt, RNAi-sense strand
aaccacagugagccugagauu

SEQ ID NO: 12462 - RNA, 21 nt, RNAi-antisense strand
ucucaggcucacugugguuuu

SEQ ID NO: 12463 - DNA, 21 bp, Homo sapiens
gagcctgagagagacggcgat

SEQ ID NO: 12464 - RNA, 21 nt, RNAi-sense strand
gccugagagagacggcgauuu

SEQ ID NO: 12465 - RNA, 21 nt, RNAi-antisense strand
aucgccgucucucucaggcuu

SEQ ID NO: 12466 - DNA, 21 bp, Homo sapiens
gaacagtccagcaaattgcta

SEQ ID NO: 12467 - RNA, 21 nt, RNAi-sense strand
acaguccagcaaauugcuauu

SEQ ID NO: 12468 - RNA, 21 nt, RNAi-antisense strand
uagcaauuugcuggacuguuu

SEQ ID NO: 12469 - DNA, 21 bp, Homo sapiens
gaagagcttaggattctaatc

SEQ ID NO: 12470 - RNA, 21 nt, RNAi-sense strand
agagcuuaggauucuaaucuu

SEQ ID NO: 12471 - RNA, 21 nt, RNAi-antisense strand
gauuagaauccuaagcucuuu

SEQ ID NO: 12472 - DNA, 21 bp, Homo sapiens
gagcttaggattctaatctca

SEQ ID NO: 12473 - RNA, 21 nt, RNAi-sense strand
gcuuaggauucuaaucucauu

SEQ ID NO: 12474 - RNA, 21 nt, RNAi-antisense strand
ugagauuagaauccuaagcuu

SEQ ID NO: 12475 - DNA, 21 bp, Homo sapiens
gagcatttgaaaggtgtgcta

SEQ ID NO: 12476 - RNA, 21 nt, RNAi-sense strand
gcauuugaaaggugugcuauu

SEQ ID NO: 12477 - RNA, 21 nt, RNAi-antisense strand
uagcacaccuuucaaaugcuu

SEQ ID NO: 12478 - DNA, 21 bp, Homo sapiens
gaaaggtgtgctagaacaagg

SEQ ID NO: 12479 - RNA, 21 nt, RNAi-sense strand
aaggugugcuagaacaagguu

SEQ ID NO: 12480 - RNA, 21 nt, RNAi-antisense strand
ccuuguucuagcacaccuuuu

SEQ ID NO: 12481 - DNA, 21 bp, Homo sapiens
gaacaaggtctcctgatccgt

SEQ ID NO: 12482 - RNA, 21 nt, RNAi-sense strand
acaaggucuccugauccguuu

SEQ ID NO: 12483 - RNA, 21 nt, RNAi-antisense strand
acggaucaggagaccuuguuu

SEQ ID NO: 12484 - DNA, 21 bp, Homo sapiens
gaaacatttcctttgaacttg

SEQ ID NO: 12485 - RNA, 21 nt, RNAi-sense strand
aacauuuccuuugaacuuguu

SEQ ID NO: 12486 - RNA, 21 nt, RNAi-antisense strand
caaguucaaaggaaauguuuu

SEQ ID NO: 12487 - DNA, 21 bp, Homo sapiens
gaacttgattgcctatggatc

SEQ ID NO: 12488 - RNA, 21 nt, RNAi-sense strand
acuugauugccuauggaucuu

SEQ ID NO: 12489 - RNA, 21 nt, RNAi-antisense strand
gauccauaggcaaucaaguuu

SEQ ID NO: 12490 - DNA, 21 bp, Homo sapiens
gattgcctatggatcaaagaa

SEQ ID NO: 12491 - RNA, 21 nt, RNAi-sense strand
uugccuauggaucaaagaauu

SEQ ID NO: 12492 - RNA, 21 nt, RNAi-antisense strand
uucuuugauccauaggcaauu

SEQ ID NO: 12493 - DNA, 21 bp, Homo sapiens
gatcaaagaaattcagaacag

SEQ ID NO: 12494 - RNA, 21 nt, RNAi-sense strand
ucaaagaaauucagaacaguu

SEQ ID NO: 12495 - RNA, 21 nt, RNAi-antisense strand
cuguucugaauuucuuugauu

SEQ ID NO: 12496 - DNA, 21 bp, Homo sapiens
gaaattcagaacagcctgcct

SEQ ID NO: 12497 - RNA, 21 nt, RNAi-sense strand
aauucagaacagccugccuuu

SEQ ID NO: 12498 - RNA, 21 nt, RNAi-antisense strand
aggcaggcuguucugaauuuu

SEQ ID NO: 12499 - DNA, 21 bp, Homo sapiens
gatgtatataagccagttcac

SEQ ID NO: 12500 - RNA, 21 nt, RNAi-sense strand
uguauauaagccaguucacuu

SEQ ID NO: 12501 - RNA, 21 nt, RNAi-antisense strand
gugaacuggcuuauauacauu

SEQ ID NO: 12502 - DNA, 21 bp, Homo sapiens
gattcttaattctctgcaaca

SEQ ID NO: 12503 - RNA, 21 nt, RNAi-sense strand
uucuuaauucucugcaacauu

SEQ ID NO: 12504 - RNA, 21 nt, RNAi-antisense strand
uguugcagagaauuaagaauu

SEQ ID NO: 12505 - DNA, 21 bp, Homo sapiens
gaggatgctgcagtgaggctg

SEQ ID NO: 12506 - RNA, 21 nt, RNAi-sense strand
ggaugcugcagugaggcuguu

SEQ ID NO: 12507 - RNA, 21 nt, RNAi-antisense strand
cagccucacugcagcauccuu

SEQ ID NO: 12508 - DNA, 21 bp, Homo sapiens
gatgctgcagtgaggctgtaa

SEQ ID NO: 12509 - RNA, 21 nt, RNAi-sense strand
ugcugcagugaggcuguaauu

SEQ ID NO: 12510 - RNA, 21 nt, RNAi-antisense strand
uuacagccucacugcagcauu

SEQ ID NO: 12511 - DNA, 21 bp, Homo sapiens
gagaaaggatggtagattctg

SEQ ID NO: 12512 - RNA, 21 nt, RNAi-sense strand
gaaaggaugguagauucuguu

SEQ ID NO: 12513 - RNA, 21 nt, RNAi-antisense strand
cagaaucuaccauccuuucuu

SEQ ID NO: 12514 - DNA, 21 bp, Homo sapiens
gaaaggatggtagattctgtt

SEQ ID NO: 12515 - RNA, 21 nt, RNAi-sense strand
aaggaugguagauucuguuuu

SEQ ID NO: 12516 - RNA, 21 nt, RNAi-antisense strand
aacagaaucuaccauccuuuu

SEQ ID NO: 12517 - DNA, 21 bp, Homo sapiens
gatggtagattctgttaactc

SEQ ID NO: 12518 - RNA, 21 nt, RNAi-sense strand
ugguagauucuguuaacucuu

SEQ ID NO: 12519 - RNA, 21 nt, RNAi-antisense strand
gaguuaacagaaucuaccauu

SEQ ID NO: 12520 - DNA, 21 bp, Homo sapiens
gattctgttaactcttgaaga

SEQ ID NO: 12521 - RNA, 21 nt, RNAi-sense strand
uucuguuaacucuugaagauu

SEQ ID NO: 12522 - RNA, 21 nt, RNAi-antisense strand
ucuucaagaguuaacagaauu

SEQ ID NO: 12523 - DNA, 21 bp, Homo sapiens
gataaattaacctctcacagt

SEQ ID NO: 12524 - RNA, 21 nt, RNAi-sense strand
uaaauuaaccucucacaguuu

SEQ ID NO: 12525 - RNA, 21 nt, RNAi-antisense strand
acugugagagguuaauuuauu

SEQ ID NO: 12526 - DNA, 21 bp, Homo sapiens
gacctttcatcgtaaagtgct

SEQ ID NO: 12527 - RNA, 21 nt, RNAi-sense strand
ccuuucaucguaaagugcuuu

SEQ ID NO: 12528 - RNA, 21 nt, RNAi-antisense strand
agcacuuuacgaugaaagguu

SEQ ID NO: 12529 - DNA, 21 bp, Homo sapiens
gaccttaagtgatttgcctgt

SEQ ID NO: 12530 - RNA, 21 nt, RNAi-sense strand
ccuuaagugauuugccuguuu

SEQ ID NO: 12531 - RNA, 21 nt, RNAi-antisense strand
acaggcaaaucacuuaagguu

SEQ ID NO: 12532 - DNA, 21 bp, Homo sapiens
gaaattcagagcaagttcctg

SEQ ID NO: 12533 - RNA, 21 nt, RNAi-sense strand
aauucagagcaaguuccuguu

SEQ ID NO: 12534 - RNA, 21 nt, RNAi-antisense strand
caggaacuugcucugaauuuu

SEQ ID NO: 12535 - DNA, 21 bp, Homo sapiens
gagcaagttcctgagtgcgtg

SEQ ID NO: 12536 - RNA, 21 nt, RNAi-sense strand
gcaaguuccugagugcguguu

SEQ ID NO: 12537 - RNA, 21 nt, RNAi-antisense strand
cacgcacucaggaacuugcuu

SEQ ID NO: 12538 - DNA, 21 bp, Homo sapiens
gattcactcaagagttcagtg

SEQ ID NO: 12539 - RNA, 21 nt, RNAi-sense strand
uucacucaagaguucaguguu

SEQ ID NO: 12540 - RNA, 21 nt, RNAi-antisense strand
cacugaacucuugagugaauu

SEQ ID NO: 12541 - DNA, 21 bp, Homo sapiens
gagttcagtgctcatacgtat

SEQ ID NO: 12542 - RNA, 21 nt, RNAi-sense strand
guucagugcucauacguauuu

SEQ ID NO: 12543 - RNA, 21 nt, RNAi-antisense strand
auacguaugagcacugaacuu

SEQ ID NO: 12544 - DNA, 21 bp, Homo sapiens
gacaaagtgcctcatgcaacc

SEQ ID NO: 12545 - RNA, 21 nt, RNAi-sense strand
caaagugccucaugcaaccuu

SEQ ID NO: 12546 - RNA, 21 nt, RNAi-antisense strand
gguugcaugaggcacuuuguu

SEQ ID NO: 12547 - DNA, 21 bp, Homo sapiens
gaacataagtagttaccacag

SEQ ID NO: 12548 - RNA, 21 nt, RNAi-sense strand
acauaaguaguuaccacaguu

SEQ ID NO: 12549 - RNA, 21 nt, RNAi-antisense strand
cugugguaacuacuuauguuu

SEQ ID NO: 12550 - DNA, 21 bp, Homo sapiens
gaatacggaagagcaggtgac

SEQ ID NO: 12551 - RNA, 21 nt, RNAi-sense strand
auacggaagagcaggugacuu

SEQ ID NO: 12552 - RNA, 21 nt, RNAi-antisense strand
gucaccugcucuuccguauuu

SEQ ID NO: 12553 - DNA, 21 bp, Homo sapiens
gaagagcaggtgactgtgctg

SEQ ID NO: 12554 - RNA, 21 nt, RNAi-sense strand
agagcaggugacugugcuguu

SEQ ID NO: 12555 - RNA, 21 nt, RNAi-antisense strand
cagcacagucaccugcucuuu

SEQ ID NO: 12556 - DNA, 21 bp, Homo sapiens
gagcaggtgactgtgctgtgc

SEQ ID NO: 12557 - RNA, 21 nt, RNAi-sense strand
gcaggugacugugcugugcuu

SEQ ID NO: 12558 - RNA, 21 nt, RNAi-antisense strand
gcacagcacagucaccugcuu

SEQ ID NO: 12559 - DNA, 21 bp, Homo sapiens
gactgtgctgtgcagctctct

SEQ ID NO: 12560 - RNA, 21 nt, RNAi-sense strand
cugugcugugcagcucucuuu

SEQ ID NO: 12561 - RNA, 21 nt, RNAi-antisense strand
agagagcugcacagcacaguu

SEQ ID NO: 12562 - DNA, 21 bp, Homo sapiens
gaattctcaggtaggaagcaa

SEQ ID NO: 12563 - RNA, 21 nt, RNAi-sense strand
auucucagguaggaagcaauu

SEQ ID NO: 12564 - RNA, 21 nt, RNAi-antisense strand
uugcuuccuaccugagaauuu

SEQ ID NO: 12565 - DNA, 21 bp, Homo sapiens
gaagcaacagcttcagaaaga

SEQ ID NO: 12566 - RNA, 21 nt, RNAi-sense strand
agcaacagcuucagaaagauu

SEQ ID NO: 12567 - RNA, 21 nt, RNAi-antisense strand
ucuuucugaagcuguugcuuu

SEQ ID NO: 12568 - DNA, 21 bp, Homo sapiens
gaaatgtgaatcgcagctgtg

SEQ ID NO: 12569 - RNA, 21 nt, RNAi-sense strand
aaugugaaucgcagcuguguu

SEQ ID NO: 12570 - RNA, 21 nt, RNAi-antisense strand
cacagcugcgauucacauuuu

SEQ ID NO: 12571 - DNA, 21 bp, Homo sapiens
gaccttgagtgtcattagtta

SEQ ID NO: 12572 - RNA, 21 nt, RNAi-sense strand
ccuugagugucauuaguuauu

SEQ ID NO: 12573 - RNA, 21 nt, RNAi-antisense strand
uaacuaaugacacucaagguu

SEQ ID NO: 12574 - DNA, 21 bp, Homo sapiens
gaggctctctgtaggcacaga

SEQ ID NO: 12575 - RNA, 21 nt, RNAi-sense strand
ggcucucuguaggcacagauu

SEQ ID NO: 12576 - RNA, 21 nt, RNAi-antisense strand
ucugugccuacagagagccuu

SEQ ID NO: 12577 - DNA, 21 bp, Homo sapiens
gagctgcactatcacgagcct

SEQ ID NO: 12578 - RNA, 21 nt, RNAi-sense strand
gcugcacuaucacgagccuuu

SEQ ID NO: 12579 - RNA, 21 nt, RNAi-antisense strand
aggcucgugauagugcagcuu

SEQ ID NO: 12580 - DNA, 21 bp, Homo sapiens
gactgattggcctggtcattg

SEQ ID NO: 12581 - RNA, 21 nt, RNAi-sense strand
cugauuggccuggucauuguu

SEQ ID NO: 12582 - RNA, 21 nt, RNAi-antisense strand
caaugaccaggccaaucaguu

SEQ ID NO: 12583 - DNA, 21 bp, Homo sapiens
gattggcctggtcattggtct

SEQ ID NO: 12584 - RNA, 21 nt, RNAi-sense strand
uuggccuggucauuggucuuu

SEQ ID NO: 12585 - RNA, 21 nt, RNAi-antisense strand
agaccaaugaccaggccaauu

SEQ ID NO: 12586 - DNA, 21 bp, Homo sapiens
gagagaggaggtttgcctgtg

SEQ ID NO: 12587 - RNA, 21 nt, RNAi-sense strand
gagaggagguuugccuguguu

SEQ ID NO: 12588 - RNA, 21 nt, RNAi-antisense strand
cacaggcaaaccuccucucuu

SEQ ID NO: 12589 - DNA, 21 bp, Homo sapiens
gagaggaggtttgcctgtgat

SEQ ID NO: 12590 - RNA, 21 nt, RNAi-sense strand
gaggagguuugccugugauuu

SEQ ID NO: 12591 - RNA, 21 nt, RNAi-antisense strand
aucacaggcaaaccuccucuu

SEQ ID NO: 12592 - DNA, 21 bp, Homo sapiens
gaggaggtttgcctgtgattt

SEQ ID NO: 12593 - RNA, 21 nt, RNAi-sense strand
ggagguuugccugugauuuuu

SEQ ID NO: 12594 - RNA, 21 nt, RNAi-antisense strand
aaaucacaggcaaaccuccuu

SEQ ID NO: 12595 - DNA, 21 bp, Homo sapiens
gaggtttgcctgtgatttgcc

SEQ ID NO: 12596 - RNA, 21 nt, RNAi-sense strand
gguuugccugugauuugccuu

SEQ ID NO: 12597 - RNA, 21 nt, RNAi-antisense strand
ggcaaaucacaggcaaaccuu

SEQ ID NO: 12598 - DNA, 21 bp, Homo sapiens
gatttgcctgtgatttcctaa

SEQ ID NO: 12599 - RNA, 21 nt, RNAi-sense strand
uuugccugugauuuccuaauu

SEQ ID NO: 12600 - RNA, 21 nt, RNAi-antisense strand
uuaggaaaucacaggcaaauu

SEQ ID NO: 12601 - DNA, 21 bp, Homo sapiens
gatttcctaattatcgctagg

SEQ ID NO: 12602 - RNA, 21 nt, RNAi-sense strand
uuuccuaauuaucgcuagguu

SEQ ID NO: 12603 - RNA, 21 nt, RNAi-antisense strand
ccuagcgauaauuaggaaauu

SEQ ID NO: 12604 - DNA, 21 bp, Homo sapiens
gaggtccttggcagaactcag

SEQ ID NO: 12605 - RNA, 21 nt, RNAi-sense strand
gguccuuggcagaacucaguu

SEQ ID NO: 12606 - RNA, 21 nt, RNAi-antisense strand
cugaguucugccaaggaccuu

SEQ ID NO: 12607 - DNA, 21 bp, Homo sapiens
gaattcaatcagagctccagt

SEQ ID NO: 12608 - RNA, 21 nt, RNAi-sense strand
auucaaucagagcuccaguuu

SEQ ID NO: 12609 - RNA, 21 nt, RNAi-antisense strand
acuggagcucugauugaauuu

SEQ ID NO: 12610 - DNA, 21 bp, Homo sapiens
gagctccagtttgcatttgga

SEQ ID NO: 12611 - RNA, 21 nt, RNAi-sense strand
gcuccaguuugcauuuggauu

SEQ ID NO: 12612 - RNA, 21 nt, RNAi-antisense strand
uccaaaugcaaacuggagcuu

SEQ ID NO: 12613 - DNA, 21 bp, Homo sapiens
gactctgagtaactggttgct

SEQ ID NO: 12614 - RNA, 21 nt, RNAi-sense strand
cucugaguaacugguugcuuu

SEQ ID NO: 12615 - RNA, 21 nt, RNAi-antisense strand
agcaaccaguuacucagaguu

SEQ ID NO: 12616 - DNA, 21 bp, Homo sapiens
gagtaactggttgctgtgtca

SEQ ID NO: 12617 - RNA, 21 nt, RNAi-sense strand
guaacugguugcugugucauu

SEQ ID NO: 12618 - RNA, 21 nt, RNAi-antisense strand
ugacacagcaaccaguuacuu

SEQ ID NO: 12619 - DNA, 21 bp, Homo sapiens
gatgcaggaggctcaggtgat

SEQ ID NO: 12620 - RNA, 21 nt, RNAi-sense strand
ugcaggaggcucaggugauuu

SEQ ID NO: 12621 - RNA, 21 nt, RNAi-antisense strand
aucaccugagccuccugcauu

SEQ ID NO: 12622 - DNA, 21 bp, Homo sapiens
gaggctcaggtgatctgtttg

SEQ ID NO: 12623 - RNA, 21 nt, RNAi-sense strand
ggcucaggugaucuguuuguu

SEQ ID NO: 12624 - RNA, 21 nt, RNAi-antisense strand
caaacagaucaccugagccuu

SEQ ID NO: 12625 - DNA, 21 bp, Homo sapiens
gatctgtttgaggagagcacc

SEQ ID NO: 12626 - RNA, 21 nt, RNAi-sense strand
ucuguuugaggagagcaccuu

SEQ ID NO: 12627 - RNA, 21 nt, RNAi-antisense strand
ggugcucuccucaaacagauu

SEQ ID NO: 12628 - DNA, 21 bp, Homo sapiens
gaataacatactggccgttct

SEQ ID NO: 12629 - RNA, 21 nt, RNAi-sense strand
auaacauacuggccguucuuu

SEQ ID NO: 12630 - RNA, 21 nt, RNAi-antisense strand
agaacggccaguauguuauuu

SEQ ID NO: 12631 - DNA, 21 bp, Homo sapiens
gacctgttgccagcagataca

SEQ ID NO: 12632 - RNA, 21 nt, RNAi-sense strand
ccuguugccagcagauacauu

SEQ ID NO: 12633 - RNA, 21 nt, RNAi-antisense strand
uguaucugcuggcaacagguu

SEQ ID NO: 12634 - DNA, 21 bp, Homo sapiens
gatacacaggacatggatgaa

SEQ ID NO: 12635 - RNA, 21 nt, RNAi-sense strand
uacacaggacauggaugaauu

SEQ ID NO: 12636 - RNA, 21 nt, RNAi-antisense strand
uucauccauguccuguguauu

SEQ ID NO: 12637 - DNA, 21 bp, Homo sapiens
tacgactacgtgagcttccag

SEQ ID NO: 12638 - RNA, 21 nt, RNAi-sense strand
cgacuacgugagcuuccaguu

SEQ ID NO: 12639 - RNA, 21 nt, RNAi-antisense strand
cuggaagcucacguagucguu

SEQ ID NO: 12640 - DNA, 21 bp, Homo sapiens
tacgtgagcttccagtcggac

SEQ ID NO: 12641 - RNA, 21 nt, RNAi-sense strand
cgugagcuuccagucggacuu

SEQ ID NO: 12642 - RNA, 21 nt, RNAi-antisense strand
guccgacuggaagcucacguu

SEQ ID NO: 12643 - DNA, 21 bp, Homo sapiens
tacaccaagccacctcagtgc

SEQ ID NO: 12644 - RNA, 21 nt, RNAi-sense strand
caccaagccaccucagugcuu

SEQ ID NO: 12645 - RNA, 21 nt, RNAi-antisense strand
gcacugagguggcuugguguu

SEQ ID NO: 12646 - DNA, 21 bp, Homo sapiens
tacttgctgacggccatccac

SEQ ID NO: 12647 - RNA, 21 nt, RNAi-sense strand
cuugcugacggccauccacuu

SEQ ID NO: 12648 - RNA, 21 nt, RNAi-antisense strand
guggauggccgucagcaaguu

SEQ ID NO: 12649 - DNA, 21 bp, Homo sapiens
tagtggacattgtaatccagt

SEQ ID NO: 12650 - RNA, 21 nt, RNAi-sense strand
guggacauuguaauccaguuu

SEQ ID NO: 12651 - RNA, 21 nt, RNAi-antisense strand
acuggauuacaauguccacuu

SEQ ID NO: 12652 - DNA, 21 bp, Homo sapiens
taatccagtcggcttgttctt

SEQ ID NO: 12653 - RNA, 21 nt, RNAi-sense strand
auccagucggcuuguucuuuu

SEQ ID NO: 12654 - RNA, 21 nt, RNAi-antisense strand
aagaacaagccgacuggauuu

SEQ ID NO: 12655 - DNA, 21 bp, Homo sapiens
taagatccgcaatgtggagca

SEQ ID NO: 12656 - RNA, 21 nt, RNAi-sense strand
agauccgcaauguggagcauu

SEQ ID NO: 12657 - RNA, 21 nt, RNAi-antisense strand
ugcuccacauugcggaucuuu

SEQ ID NO: 12658 - DNA, 21 bp, Homo sapiens
tattggctgatctatgccttt

SEQ ID NO: 12659 - RNA, 21 nt, RNAi-sense strand
uuggcugaucuaugccuuuuu

SEQ ID NO: 12660 - RNA, 21 nt, RNAi-antisense strand
aaaggcauagaucagccaauu

SEQ ID NO: 12661 - DNA, 21 bp, Homo sapiens
taatgattggcaagtcacgtt

SEQ ID NO: 12662 - RNA, 21 nt, RNAi-sense strand
augauuggcaagucacguuuu

SEQ ID NO: 12663 - RNA, 21 nt, RNAi-antisense strand
aacgugacuugccaaucauuu

SEQ ID NO: 12664 - DNA, 21 bp, Homo sapiens
tagtttctttctgtctgcttt

SEQ ID NO: 12665 - RNA, 21 nt, RNAi-sense strand
guuucuuucugucugcuuuuu

SEQ ID NO: 12666 - RNA, 21 nt, RNAi-antisense strand
aaagcagacagaaagaaacuu

SEQ ID NO: 12667 - DNA, 21 bp, Homo sapiens
taaatggaaacagactcatac

SEQ ID NO: 12668 - RNA, 21 nt, RNAi-sense strand
aauggaaacagacucauacuu

SEQ ID NO: 12669 - RNA, 21 nt, RNAi-antisense strand
guaugagucuguuuccauuuu

SEQ ID NO: 12670 - DNA, 21 bp, Homo sapiens
taccacacttacaattaaggt

SEQ ID NO: 12671 - RNA, 21 nt, RNAi-sense strand
ccacacuuacaauuaagguuu

SEQ ID NO: 12672 - RNA, 21 nt, RNAi-antisense strand
accuuaauuguaagugugguu

SEQ ID NO: 12673 - DNA, 21 bp, Homo sapiens
tatctaatagtgacagcaaag

SEQ ID NO: 12674 - RNA, 21 nt, RNAi-sense strand
ucuaauagugacagcaaaguu

SEQ ID NO: 12675 - RNA, 21 nt, RNAi-antisense strand
cuuugcugucacuauuagauu

SEQ ID NO: 12676 - DNA, 21 bp, Homo sapiens
tagaacagtccagcaaattgc

SEQ ID NO: 12677 - RNA, 21 nt, RNAi-sense strand
gaacaguccagcaaauugcuu

SEQ ID NO: 12678 - RNA, 21 nt, RNAi-antisense strand
gcaauuugcuggacuguucuu

SEQ ID NO: 12679 - DNA, 21 bp, Homo sapiens
tacattgagcatttgaaaggt

SEQ ID NO: 12680 - RNA, 21 nt, RNAi-sense strand
cauugagcauuugaaagguuu

SEQ ID NO: 12681 - RNA, 21 nt, RNAi-antisense strand
accuuucaaaugcucaauguu

SEQ ID NO: 12682 - DNA, 21 bp, Homo sapiens
tagaacaaggtctcctgatcc

SEQ ID NO: 12683 - RNA, 21 nt, RNAi-sense strand
gaacaaggucuccugauccuu

SEQ ID NO: 12684 - RNA, 21 nt, RNAi-antisense strand
ggaucaggagaccuuguucuu

SEQ ID NO: 12685 - DNA, 21 bp, Homo sapiens
tagtgtagctgtgtggctttc

SEQ ID NO: 12686 - RNA, 21 nt, RNAi-sense strand
guguagcuguguggcuuucuu

SEQ ID NO: 12687 - RNA, 21 nt, RNAi-antisense strand
gaaagccacacagcuacacuu

SEQ ID NO: 12688 - DNA, 21 bp, Homo sapiens
tagctgtgtggctttccttcc

SEQ ID NO: 12689 - RNA, 21 nt, RNAi-sense strand
gcuguguggcuuuccuuccuu

SEQ ID NO: 12690 - RNA, 21 nt, RNAi-antisense strand
ggaaggaaagccacacagcuu

SEQ ID NO: 12691 - DNA, 21 bp, Homo sapiens
taatcagcgatgtatataagc

SEQ ID NO: 12692 - RNA, 21 nt, RNAi-sense strand
aucagcgauguauauaagcuu

SEQ ID NO: 12693 - RNA, 21 nt, RNAi-antisense strand
gcuuauauacaucgcugauuu

SEQ ID NO: 12694 - DNA, 21 bp, Homo sapiens
tatataagccagttcacttag

SEQ ID NO: 12695 - RNA, 21 nt, RNAi-sense strand
uauaagccaguucacuuaguu

SEQ ID NO: 12696 - RNA, 21 nt, RNAi-antisense strand
cuaagugaacuggcuuauauu

SEQ ID NO: 12697 - DNA, 21 bp, Homo sapiens
tataagccagttcacttagac

SEQ ID NO: 12698 - RNA, 21 nt, RNAi-sense strand
uaagccaguucacuuagacuu

SEQ ID NO: 12699 - RNA, 21 nt, RNAi-antisense strand
gucuaagugaacuggcuuauu

SEQ ID NO: 12700 - DNA, 21 bp, Homo sapiens
taagccagttcacttagacaa

SEQ ID NO: 12701 - RNA, 21 nt, RNAi-sense strand
agccaguucacuuagacaauu

SEQ ID NO: 12702 - RNA, 21 nt, RNAi-antisense strand
uugucuaagugaacuggcuuu

SEQ ID NO: 12703 - DNA, 21 bp, Homo sapiens
taattctctgcaacactttga

SEQ ID NO: 12704 - RNA, 21 nt, RNAi-sense strand
auucucugcaacacuuugauu

SEQ ID NO: 12705 - RNA, 21 nt, RNAi-antisense strand
ucaaaguguugcagagaauuu

SEQ ID NO: 12706 - DNA, 21 bp, Homo sapiens
taactcttgaagactccagta

SEQ ID NO: 12707 - RNA, 21 nt, RNAi-sense strand
acucuugaagacuccaguauu

SEQ ID NO: 12708 - RNA, 21 nt, RNAi-antisense strand
uacuggagucuucaagaguuu

SEQ ID NO: 12709 - DNA, 21 bp, Homo sapiens
tagttacctaccggagagtta

SEQ ID NO: 12710 - RNA, 21 nt, RNAi-sense strand
guuaccuaccggagaguuauu

SEQ ID NO: 12711 - RNA, 21 nt, RNAi-antisense strand
uaacucuccgguagguaacuu

SEQ ID NO: 12712 - DNA, 21 bp, Homo sapiens
tacctaccggagagttatcct

SEQ ID NO: 12713 - RNA, 21 nt, RNAi-sense strand
ccuaccggagaguuauccuuu

SEQ ID NO: 12714 - RNA, 21 nt, RNAi-antisense strand
aggauaacucuccgguagguu

SEQ ID NO: 12715 - DNA, 21 bp, Homo sapiens
taccggagagttatcctgata

SEQ ID NO: 12716 - RNA, 21 nt, RNAi-sense strand
ccggagaguuauccugauauu

SEQ ID NO: 12717 - RNA, 21 nt, RNAi-antisense strand
uaucaggauaacucuccgguu

SEQ ID NO: 12718 - DNA, 21 bp, Homo sapiens
taacctctcacagttagtgat

SEQ ID NO: 12719 - RNA, 21 nt, RNAi-sense strand
accucucacaguuagugauuu

SEQ ID NO: 12720 - RNA, 21 nt, RNAi-antisense strand
aucacuaacugugagagguuu

SEQ ID NO: 12721 - DNA, 21 bp, Homo sapiens
tattctacttctctgttgtca

SEQ ID NO: 12722 - RNA, 21 nt, RNAi-sense strand
uucuacuucucuguugucauu

SEQ ID NO: 12723 - RNA, 21 nt, RNAi-antisense strand
ugacaacagagaaguagaauu

SEQ ID NO: 12724 - DNA, 21 bp, Homo sapiens
tacttctctgttgtcaaactg

SEQ ID NO: 12725 - RNA, 21 nt, RNAi-sense strand
cuucucuguugucaaacuguu

SEQ ID NO: 12726 - RNA, 21 nt, RNAi-antisense strand
caguuugacaacagagaaguu

SEQ ID NO: 12727 - DNA, 21 bp, Homo sapiens
tagttctggttgattcactca

SEQ ID NO: 12728 - RNA, 21 nt, RNAi-sense strand
guucugguugauucacucauu

SEQ ID NO: 12729 - RNA, 21 nt, RNAi-antisense strand
ugagugaaucaaccagaacuu

SEQ ID NO: 12730 - DNA, 21 bp, Homo sapiens
tacctggaacataagtagtta

SEQ ID NO: 12731 - RNA, 21 nt, RNAi-sense strand
ccuggaacauaaguaguuauu

SEQ ID NO: 12732 - RNA, 21 nt, RNAi-antisense strand
uaacuacuuauguuccagguu

SEQ ID NO: 12733 - DNA, 21 bp, Homo sapiens
taagtagttaccacagaatac

SEQ ID NO: 12734 - RNA, 21 nt, RNAi-sense strand
aguaguuaccacagaauacuu

SEQ ID NO: 12735 - RNA, 21 nt, RNAi-antisense strand
guauucugugguaacuacuuu

SEQ ID NO: 12736 - DNA, 21 bp, Homo sapiens
tagttaccacagaatacggaa

SEQ ID NO: 12737 - RNA, 21 nt, RNAi-sense strand
guuaccacagaauacggaauu

SEQ ID NO: 12738 - RNA, 21 nt, RNAi-antisense strand
uuccguauucugugguaacuu

SEQ ID NO: 12739 - DNA, 21 bp, Homo sapiens
taccacagaatacggaagagc

SEQ ID NO: 12740 - RNA, 21 nt, RNAi-sense strand
ccacagaauacggaagagcuu

SEQ ID NO: 12741 - RNA, 21 nt, RNAi-antisense strand
gcucuuccguauucugugguu

SEQ ID NO: 12742 - DNA, 21 bp, Homo sapiens
tacggaagagcaggtgactgt

SEQ ID NO: 12743 - RNA, 21 nt, RNAi-sense strand
cggaagagcaggugacuguuu

SEQ ID NO: 12744 - RNA, 21 nt, RNAi-antisense strand
acagucaccugcucuuccguu

SEQ ID NO: 12745 - DNA, 21 bp, Homo sapiens
taggaagcaacagcttcagaa

SEQ ID NO: 12746 - RNA, 21 nt, RNAi-sense strand
ggaagcaacagcuucagaauu

SEQ ID NO: 12747 - RNA, 21 nt, RNAi-antisense strand
uucugaagcuguugcuuccuu

SEQ ID NO: 12748 - DNA, 21 bp, Homo sapiens
taaattggaaatgtgaatcgc

SEQ ID NO: 12749 - RNA, 21 nt, RNAi-sense strand
aauuggaaaugugaaucgcuu

SEQ ID NO: 12750 - RNA, 21 nt, RNAi-antisense strand
gcgauucacauuuccaauuuu

SEQ ID NO: 12751 - DNA, 21 bp, Homo sapiens
taccaccgtctgtctcagagt

SEQ ID NO: 12752 - RNA, 21 nt, RNAi-sense strand
ccaccgucugucucagaguuu

SEQ ID NO: 12753 - RNA, 21 nt, RNAi-antisense strand
acucugagacagacggugguu

SEQ ID NO: 12754 - DNA, 21 bp, Homo sapiens
tagcagctttgtctctgtcac

SEQ ID NO: 12755 - RNA, 21 nt, RNAi-sense strand
gcagcuuugucucugucacuu

SEQ ID NO: 12756 - RNA, 21 nt, RNAi-antisense strand
gugacagagacaaagcugcuu

SEQ ID NO: 12757 - DNA, 21 bp, Homo sapiens
taggcacagagctgcactatc

SEQ ID NO: 12758 - RNA, 21 nt, RNAi-sense strand
ggcacagagcugcacuaucuu

SEQ ID NO: 12759 - RNA, 21 nt, RNAi-antisense strand
gauagugcagcucugugccuu

SEQ ID NO: 12760 - DNA, 21 bp, Homo sapiens
taatcattctggatagagtcc

SEQ ID NO: 12761 - RNA, 21 nt, RNAi-sense strand
aucauucuggauagaguccuu

SEQ ID NO: 12762 - RNA, 21 nt, RNAi-antisense strand
ggacucuauccagaaugauuu

SEQ ID NO: 12763 - DNA, 21 bp, Homo sapiens
tatcctgtgtaacacttggct

SEQ ID NO: 12764 - RNA, 21 nt, RNAi-sense strand
uccuguguaacacuuggcuuu

SEQ ID NO: 12765 - RNA, 21 nt, RNAi-antisense strand
agccaaguguuacacaggauu

SEQ ID NO: 12766 - DNA, 21 bp, Homo sapiens
taacacttggctcttggtacc

SEQ ID NO: 12767 - RNA, 21 nt, RNAi-sense strand
acacuuggcucuugguaccuu

SEQ ID NO: 12768 - RNA, 21 nt, RNAi-antisense strand
gguaccaagagccaaguguuu

SEQ ID NO: 12769 - DNA, 21 bp, Homo sapiens
tagaattcaatcagagctcca

SEQ ID NO: 12770 - RNA, 21 nt, RNAi-sense strand
gaauucaaucagagcuccauu

SEQ ID NO: 12771 - RNA, 21 nt, RNAi-antisense strand
uggagcucugauugaauucuu

SEQ ID NO: 12772 - DNA, 21 bp, Homo sapiens
taactggttgctgtgtcataa

SEQ ID NO: 12773 - RNA, 21 nt, RNAi-sense strand
acugguugcugugucauaauu

SEQ ID NO: 12774 - RNA, 21 nt, RNAi-antisense strand
uuaugacacagcaaccaguuu

SEQ ID NO: 12775 - DNA, 21 bp, Homo sapiens
taacttcatagatgcaggagg

SEQ ID NO: 12776 - RNA, 21 nt, RNAi-sense strand
acuucauagaugcaggagguu

SEQ ID NO: 12777 - RNA, 21 nt, RNAi-antisense strand
ccuccugcaucuaugaaguuu

SEQ ID NO: 12778 - DNA, 21 bp, Homo sapiens
tagatgcaggaggctcaggtg

SEQ ID NO: 12779 - RNA, 21 nt, RNAi-sense strand
gaugcaggaggcucagguguu

SEQ ID NO: 12780 - RNA, 21 nt, RNAi-antisense strand
caccugagccuccugcaucuu

SEQ ID NO: 12781 - DNA, 21 bp, Homo sapiens
taacatactggccgttctgac

SEQ ID NO: 12782 - RNA, 21 nt, RNAi-sense strand
acauacuggccguucugacuu

SEQ ID NO: 12783 - RNA, 21 nt, RNAi-antisense strand
gucagaacggccaguauguuu

SEQ ID NO: 12784 - DNA, 21 bp, Homo sapiens
tactggccgttctgacctgtt

SEQ ID NO: 12785 - RNA, 21 nt, RNAi-sense strand
cuggccguucugaccuguuuu

SEQ ID NO: 12786 - RNA, 21 nt, RNAi-antisense strand
aacaggucagaacggccaguu

SEQ ID NO: 12787 - DNA, 21 bp, Homo sapiens
tacacaggacatggatgaaat

SEQ ID NO: 12788 - RNA, 21 nt, RNAi-sense strand
cacaggacauggaugaaauuu

SEQ ID NO: 12789 - RNA, 21 nt, RNAi-antisense strand
auuucauccauguccuguguu

SEQ ID NO: 12790 - DNA, 21 bp, Homo sapiens
tagtttcttcctgtagtactc

SEQ ID NO: 12791 - RNA, 21 nt, RNAi-sense strand
guuucuuccuguaguacucuu

SEQ ID NO: 12792 - RNA, 21 nt, RNAi-antisense strand
gaguacuacaggaagaaacuu

SEQ ID NO: 12793 - DNA, 21 bp, Homo sapiens
tagatcctaagtctcttacaa

SEQ ID NO: 12794 - RNA, 21 nt, RNAi-sense strand
gauccuaagucucuuacaauu

SEQ ID NO: 12795 - RNA, 21 nt, RNAi-antisense strand
uuguaagagacuuaggaucuu

SEQ ID NO: 12796 - DNA, 21 bp, Homo sapiens
aagaagcttgtgctgtacctg

SEQ ID NO: 12797 - RNA, 21 nt, RNAi-sense strand
gaagcuugugcuguaccuguu

SEQ ID NO: 12798 - RNA, 21 nt, RNAi-antisense strand
cagguacagcacaagcuucuu

SEQ ID NO: 12799 - DNA, 21 bp, Homo sapiens
catgcagttcttcggcttcta

SEQ ID NO: 12800 - RNA, 21 nt, RNAi-sense strand
ugcaguucuucggcuucuauu

SEQ ID NO: 12801 - RNA, 21 nt, RNAi-antisense strand
uagaagccgaagaacugcauu

SEQ ID NO: 12802 - DNA, 21 bp, Homo sapiens
gagatgcttaagtgtgacaag

SEQ ID NO: 12803 - RNA, 21 nt, RNAi-sense strand
gaugcuuaagugugacaaguu

SEQ ID NO: 12804 - RNA, 21 nt, RNAi-antisense strand
cuugucacacuuaagcaucuu

SEQ ID NO: 12805 - DNA, 21 bp, Homo sapiens
gaaatctgaggccatcattga

SEQ ID NO: 12806 - RNA, 21 nt, RNAi-sense strand
aaucugaggccaucauugauu

SEQ ID NO: 12807 - RNA, 21 nt, RNAi-antisense strand
ucaaugauggccucagauuuu

SEQ ID NO: 12808 - DNA, 21 bp, Homo sapiens
gaagaagcttgtgctgtacct

SEQ ID NO: 12809 - RNA, 21 nt, RNAi-sense strand
agaagcuugugcuguaccuuu

SEQ ID NO: 12810 - RNA, 21 nt, RNAi-antisense strand
agguacagcacaagcuucuuu

SEQ ID NO: 12811 - DNA, 21 bp, Homo sapiens
aaggcacacagagcaccagct

SEQ ID NO: 12812 - RNA, 21 nt, RNAi-sense strand
ggcacacagagcaccagcuuu

SEQ ID NO: 12813 - RNA, 21 nt, RNAi-antisense strand
agcuggugcucugugugccuu

SEQ ID NO: 12814 - DNA, 21 bp, Homo sapiens
aagatgttccaccaaatttgg

SEQ ID NO: 12815 - RNA, 21 nt, RNAi-sense strand
gauguuccaccaaauuugguu

SEQ ID NO: 12816 - RNA, 21 nt, RNAi-antisense strand
ccaaauuugguggaacaucuu

SEQ ID NO: 12817 - DNA, 21 bp, Homo sapiens
aacattgtcttcaatatggct

SEQ ID NO: 12818 - RNA, 21 nt, RNAi-sense strand
cauugucuucaauauggcuuu

SEQ ID NO: 12819 - RNA, 21 nt, RNAi-antisense strand
agccauauugaagacaauguu

SEQ ID NO: 12820 - DNA, 21 bp, Homo sapiens
aatatggctgctggctctgcc

SEQ ID NO: 12821 - RNA, 21 nt, RNAi-sense strand
uauggcugcuggcucugccuu

SEQ ID NO: 12822 - RNA, 21 nt, RNAi-antisense strand
ggcagagccagcagccauauu

SEQ ID NO: 12823 - DNA, 21 bp, Homo sapiens
aaatggatctaccacctgact

SEQ ID NO: 12824 - RNA, 21 nt, RNAi-sense strand
auggaucuaccaccugacuuu

SEQ ID NO: 12825 - RNA, 21 nt, RNAi-antisense strand
agucaggugguagauccauuu

SEQ ID NO: 12826 - DNA, 21 bp, Homo sapiens
aatggatctaccacctgactg

SEQ ID NO: 12827 - RNA, 21 nt, RNAi-sense strand
uggaucuaccaccugacuguu

SEQ ID NO: 12828 - RNA, 21 nt, RNAi-antisense strand
cagucaggugguagauccauu

SEQ ID NO: 12829 - DNA, 21 bp, Homo sapiens
aatcatgctgaatgagacagg

SEQ ID NO: 12830 - RNA, 21 nt, RNAi-sense strand
ucaugcugaaugagacagguu

SEQ ID NO: 12831 - RNA, 21 nt, RNAi-antisense strand
ccugucucauucagcaugauu

SEQ ID NO: 12832 - DNA, 21 bp, Homo sapiens
aaagtgtgtggaggaattcaa

SEQ ID NO: 12833 - RNA, 21 nt, RNAi-sense strand
aguguguggaggaauucaauu

SEQ ID NO: 12834 - RNA, 21 nt, RNAi-antisense strand
uugaauuccuccacacacuuu

SEQ ID NO: 12835 - DNA, 21 bp, Homo sapiens
aagtgtgtggaggaattcaag

SEQ ID NO: 12836 - RNA, 21 nt, RNAi-sense strand
guguguggaggaauucaaguu

SEQ ID NO: 12837 - RNA, 21 nt, RNAi-antisense strand
cuugaauuccuccacacacuu

SEQ ID NO: 12838 - DNA, 21 bp, Homo sapiens
aaagccttcttattgactcct

SEQ ID NO: 12839 - RNA, 21 nt, RNAi-sense strand
agccuucuuauugacuccuuu

SEQ ID NO: 12840 - RNA, 21 nt, RNAi-antisense strand
aggagucaauaagaaggcuuu

SEQ ID NO: 12841 - DNA, 21 bp, Homo sapiens
aagccttcttattgactccta

SEQ ID NO: 12842 - RNA, 21 nt, RNAi-sense strand
gccuucuuauugacuccuauu

SEQ ID NO: 12843 - RNA, 21 nt, RNAi-antisense strand
uaggagucaauaagaaggcuu

SEQ ID NO: 12844 - DNA, 21 bp, Homo sapiens
aatcaagaggcctgtgagctg

SEQ ID NO: 12845 - RNA, 21 nt, RNAi-sense strand
ucaagaggccugugagcuguu

SEQ ID NO: 12846 - RNA, 21 nt, RNAi-antisense strand
cagcucacaggccucuugauu

SEQ ID NO: 12847 - DNA, 21 bp, Homo sapiens
aagaggcctgtgagctgtcca

SEQ ID NO: 12848 - RNA, 21 nt, RNAi-sense strand
gaggccugugagcuguccauu

SEQ ID NO: 12849 - RNA, 21 nt, RNAi-antisense strand
uggacagcucacaggccucuu

SEQ ID NO: 12850 - DNA, 21 bp, Homo sapiens
aataactgacctgtaacttca

SEQ ID NO: 12851 - RNA, 21 nt, RNAi-sense strand
uaacugaccuguaacuucauu

SEQ ID NO: 12852 - RNA, 21 nt, RNAi-antisense strand
ugaaguuacaggucaguuauu

SEQ ID NO: 12853 - DNA, 21 bp, Homo sapiens
aactgacctgtaacttcatct

SEQ ID NO: 12854 - RNA, 21 nt, RNAi-sense strand
cugaccuguaacuucaucuuu

SEQ ID NO: 12855 - RNA, 21 nt, RNAi-antisense strand
agaugaaguuacaggucaguu

SEQ ID NO: 12856 - DNA, 21 bp, Homo sapiens
aagctggagacttccagctcc

SEQ ID NO: 12857 - RNA, 21 nt, RNAi-sense strand
gcuggagacuuccagcuccuu

SEQ ID NO: 12858 - RNA, 21 nt, RNAi-antisense strand
ggagcuggaagucuccagcuu

SEQ ID NO: 12859 - DNA, 21 bp, Homo sapiens
cagttaaggcacacagagcac

SEQ ID NO: 12860 - RNA, 21 nt, RNAi-sense strand
guuaaggcacacagagcacuu

SEQ ID NO: 12861 - RNA, 21 nt, RNAi-antisense strand
gugcucugugugccuuaacuu

SEQ ID NO: 12862 - DNA, 21 bp, Homo sapiens
cagctctgctctacttctatg

SEQ ID NO: 12863 - RNA, 21 nt, RNAi-sense strand
gcucugcucuacuucuauguu

SEQ ID NO: 12864 - RNA, 21 nt, RNAi-antisense strand
cauagaaguagagcagagcuu

SEQ ID NO: 12865 - DNA, 21 bp, Homo sapiens
cacagtcaactgacaactctg

SEQ ID NO: 12866 - RNA, 21 nt, RNAi-sense strand
cagucaacugacaacucuguu

SEQ ID NO: 12867 - RNA, 21 nt, RNAi-antisense strand
cagaguugucaguugacuguu

SEQ ID NO: 12868 - DNA, 21 bp, Homo sapiens
caccaaggaggagttggcaac

SEQ ID NO: 12869 - RNA, 21 nt, RNAi-sense strand
ccaaggaggaguuggcaacuu

SEQ ID NO: 12870 - RNA, 21 nt, RNAi-antisense strand
guugccaacuccuccuugguu

SEQ ID NO: 12871 - DNA, 21 bp, Homo sapiens
caaggaggagttggcaacttt

SEQ ID NO: 12872 - RNA, 21 nt, RNAi-sense strand
aggaggaguuggcaacuuuuu

SEQ ID NO: 12873 - RNA, 21 nt, RNAi-antisense strand
aaaguugccaacuccuccuuu

SEQ ID NO: 12874 - DNA, 21 bp, Homo sapiens
caacattgtcttcaatatggc

SEQ ID NO: 12875 - RNA, 21 nt, RNAi-sense strand
acauugucuucaauauggcuu

SEQ ID NO: 12876 - RNA, 21 nt, RNAi-antisense strand
gccauauugaagacaauguuu

SEQ ID NO: 12877 - DNA, 21 bp, Homo sapiens
cattgtcttcaatatggctgc

SEQ ID NO: 12878 - RNA, 21 nt, RNAi-sense strand
uugucuucaauauggcugcuu

SEQ ID NO: 12879 - RNA, 21 nt, RNAi-antisense strand
gcagccauauugaagacaauu

SEQ ID NO: 12880 - DNA, 21 bp, Homo sapiens
caatatggctgctggctctgc

SEQ ID NO: 12881 - RNA, 21 nt, RNAi-sense strand
auauggcugcuggcucugcuu

SEQ ID NO: 12882 - RNA, 21 nt, RNAi-antisense strand
gcagagccagcagccauauuu

SEQ ID NO: 12883 - DNA, 21 bp, Homo sapiens
cagctccaccttcgtgctacc

SEQ ID NO: 12884 - RNA, 21 nt, RNAi-sense strand
gcuccaccuucgugcuaccuu

SEQ ID NO: 12885 - RNA, 21 nt, RNAi-antisense strand
gguagcacgaagguggagcuu

SEQ ID NO: 12886 - DNA, 21 bp, Homo sapiens
caccttcgtgctaccatccgc

SEQ ID NO: 12887 - RNA, 21 nt, RNAi-sense strand
ccuucgugcuaccauccgcuu

SEQ ID NO: 12888 - RNA, 21 nt, RNAi-antisense strand
gcggaugguagcacgaagguu

SEQ ID NO: 12889 - DNA, 21 bp, Homo sapiens
cacagatctcagaactgaagg

SEQ ID NO: 12890 - RNA, 21 nt, RNAi-sense strand
cagaucucagaacugaagguu

SEQ ID NO: 12891 - RNA, 21 nt, RNAi-antisense strand
ccuucaguucugagaucuguu

SEQ ID NO: 12892 - DNA, 21 bp, Homo sapiens
cagatctcagaactgaaggcc

SEQ ID NO: 12893 - RNA, 21 nt, RNAi-sense strand
gaucucagaacugaaggccuu

SEQ ID NO: 12894 - RNA, 21 nt, RNAi-antisense strand
ggccuucaguucugagaucuu

SEQ ID NO: 12895 - DNA, 21 bp, Homo sapiens
caggtggaatcatgctgaatg

SEQ ID NO: 12896 - RNA, 21 nt, RNAi-sense strand
gguggaaucaugcugaauguu

SEQ ID NO: 12897 - RNA, 21 nt, RNAi-antisense strand
cauucagcaugauuccaccuu

SEQ ID NO: 12898 - DNA, 21 bp, Homo sapiens
catgctgaatgagacaggcca

SEQ ID NO: 12899 - RNA, 21 nt, RNAi-sense strand
ugcugaaugagacaggccauu

SEQ ID NO: 12900 - RNA, 21 nt, RNAi-antisense strand
uggccugucucauucagcauu

SEQ ID NO: 12901 - DNA, 21 bp, Homo sapiens
cagcgctttctcctctacaat

SEQ ID NO: 12902 - RNA, 21 nt, RNAi-sense strand
gcgcuuucuccucuacaauuu

SEQ ID NO: 12903 - RNA, 21 nt, RNAi-antisense strand
auuguagaggagaaagcgcuu

SEQ ID NO: 12904 - DNA, 21 bp, Homo sapiens
caatcgctcaccacatcctcc

SEQ ID NO: 12905 - RNA, 21 nt, RNAi-sense strand
aucgcucaccacauccuccuu

SEQ ID NO: 12906 - RNA, 21 nt, RNAi-antisense strand
ggaggauguggugagcgauuu

SEQ ID NO: 12907 - DNA, 21 bp, Homo sapiens
caaagccttcttattgactcc

SEQ ID NO: 12908 - RNA, 21 nt, RNAi-sense strand
aagccuucuuauugacuccuu

SEQ ID NO: 12909 - RNA, 21 nt, RNAi-antisense strand
ggagucaauaagaaggcuuuu

SEQ ID NO: 12910 - DNA, 21 bp, Homo sapiens
caagaggcctgtgagctgtcc

SEQ ID NO: 12911 - RNA, 21 nt, RNAi-sense strand
agaggccugugagcuguccuu

SEQ ID NO: 12912 - RNA, 21 nt, RNAi-antisense strand
ggacagcucacaggccucuuu

SEQ ID NO: 12913 - DNA, 21 bp, Homo sapiens
caataactgacctgtaacttc

SEQ ID NO: 12914 - RNA, 21 nt, RNAi-sense strand
auaacugaccuguaacuucuu

SEQ ID NO: 12915 - RNA, 21 nt, RNAi-antisense strand
gaaguuacaggucaguuauuu

SEQ ID NO: 12916 - DNA, 21 bp, Homo sapiens
gagtggactgagcagccagta

SEQ ID NO: 12917 - RNA, 21 nt, RNAi-sense strand
guggacugagcagccaguauu

SEQ ID NO: 12918 - RNA, 21 nt, RNAi-antisense strand
uacuggcugcucaguccacuu

SEQ ID NO: 12919 - DNA, 21 bp, Homo sapiens
gagagagcagttaaggcacac

SEQ ID NO: 12920 - RNA, 21 nt, RNAi-sense strand
gagagcaguuaaggcacacuu

SEQ ID NO: 12921 - RNA, 21 nt, RNAi-antisense strand
gugugccuuaacugcucucuu

SEQ ID NO: 12922 - DNA, 21 bp, Homo sapiens
gagagcagttaaggcacacag

SEQ ID NO: 12923 - RNA, 21 nt, RNAi-sense strand
gagcaguuaaggcacacaguu

SEQ ID NO: 12924 - RNA, 21 nt, RNAi-antisense strand
cugugugccuuaacugcucuu

SEQ ID NO: 12925 - DNA, 21 bp, Homo sapiens
gagcagttaaggcacacagag

SEQ ID NO: 12926 - RNA, 21 nt, RNAi-sense strand
gcaguuaaggcacacagaguu

SEQ ID NO: 12927 - RNA, 21 nt, RNAi-antisense strand
cucugugugccuuaacugcuu

SEQ ID NO: 12928 - DNA, 21 bp, Homo sapiens
gaagatgttccaccaaatttg

SEQ ID NO: 12929 - RNA, 21 nt, RNAi-sense strand
agauguuccaccaaauuuguu

SEQ ID NO: 12930 - RNA, 21 nt, RNAi-antisense strand
caaauuugguggaacaucuuu

SEQ ID NO: 12931 - DNA, 21 bp, Homo sapiens
gagcacagtcaactgacaact

SEQ ID NO: 12932 - RNA, 21 nt, RNAi-sense strand
gcacagucaacugacaacuuu

SEQ ID NO: 12933 - RNA, 21 nt, RNAi-antisense strand
aguugucaguugacugugcuu

SEQ ID NO: 12934 - DNA, 21 bp, Homo sapiens
gacaacattgtcttcaatatg

SEQ ID NO: 12935 - RNA, 21 nt, RNAi-sense strand
caacauugucuucaauauguu

SEQ ID NO: 12936 - RNA, 21 nt, RNAi-antisense strand
cauauugaagacaauguuguu

SEQ ID NO: 12937 - DNA, 21 bp, Homo sapiens
gatgcagctccaccttcgtgc

SEQ ID NO: 12938 - RNA, 21 nt, RNAi-sense strand
ugcagcuccaccuucgugcuu

SEQ ID NO: 12939 - RNA, 21 nt, RNAi-antisense strand
gcacgaagguggagcugcauu

SEQ ID NO: 12940 - DNA, 21 bp, Homo sapiens
gaaatggatctaccacctgac

SEQ ID NO: 12941 - RNA, 21 nt, RNAi-sense strand
aauggaucuaccaccugacuu

SEQ ID NO: 12942 - RNA, 21 nt, RNAi-antisense strand
gucaggugguagauccauuuu

SEQ ID NO: 12943 - DNA, 21 bp, Homo sapiens
gatctaccacctgactgaagg

SEQ ID NO: 12944 - RNA, 21 nt, RNAi-sense strand
ucuaccaccugacugaagguu

SEQ ID NO: 12945 - RNA, 21 nt, RNAi-antisense strand
ccuucagucaggugguagauu

SEQ ID NO: 12946 - DNA, 21 bp, Homo sapiens
gagcacagatctcagaactga

SEQ ID NO: 12947 - RNA, 21 nt, RNAi-sense strand
gcacagaucucagaacugauu

SEQ ID NO: 12948 - RNA, 21 nt, RNAi-antisense strand
ucaguucugagaucugugcuu

SEQ ID NO: 12949 - DNA, 21 bp, Homo sapiens
gatctcagaactgaaggccgc

SEQ ID NO: 12950 - RNA, 21 nt, RNAi-sense strand
ucucagaacugaaggccgcuu

SEQ ID NO: 12951 - RNA, 21 nt, RNAi-antisense strand
gcggccuucaguucugagauu

SEQ ID NO: 12952 - DNA, 21 bp, Homo sapiens
gacatgaagactgagctcttt

SEQ ID NO: 12953 - RNA, 21 nt, RNAi-sense strand
caugaagacugagcucuuuuu

SEQ ID NO: 12954 - RNA, 21 nt, RNAi-antisense strand
aaagagcucagucuucauguu

SEQ ID NO: 12955 - DNA, 21 bp, Homo sapiens
gaatcatgctgaatgagacag

SEQ ID NO: 12956 - RNA, 21 nt, RNAi-sense strand
aucaugcugaaugagacaguu

SEQ ID NO: 12957 - RNA, 21 nt, RNAi-antisense strand
cugucucauucagcaugauuu

SEQ ID NO: 12958 - DNA, 21 bp, Homo sapiens
gacttcctgcctggactccaa

SEQ ID NO: 12959 - RNA, 21 nt, RNAi-sense strand
cuuccugccuggacuccaauu

SEQ ID NO: 12960 - RNA, 21 nt, RNAi-antisense strand
uuggaguccaggcaggaaguu

SEQ ID NO: 12961 - DNA, 21 bp, Homo sapiens
gactccaaagccttcttattg

SEQ ID NO: 12962 - RNA, 21 nt, RNAi-sense strand
cuccaaagccuucuuauuguu

SEQ ID NO: 12963 - RNA, 21 nt, RNAi-antisense strand
caauaagaaggcuuuggaguu

SEQ ID NO: 12964 - DNA, 21 bp, Homo sapiens
gactcctaggaatcaagaggc

SEQ ID NO: 12965 - RNA, 21 nt, RNAi-sense strand
cuccuaggaaucaagaggcuu

SEQ ID NO: 12966 - RNA, 21 nt, RNAi-antisense strand
gccucuugauuccuaggaguu

SEQ ID NO: 12967 - DNA, 21 bp, Homo sapiens
gaatcaagaggcctgtgagct

SEQ ID NO: 12968 - RNA, 21 nt, RNAi-sense strand
aucaagaggccugugagcuuu

SEQ ID NO: 12969 - RNA, 21 nt, RNAi-antisense strand
agcucacaggccucuugauuu

SEQ ID NO: 12970 - DNA, 21 bp, Homo sapiens
gaggcctgtgagctgtccaat

SEQ ID NO: 12971 - RNA, 21 nt, RNAi-sense strand
ggccugugagcuguccaauuu

SEQ ID NO: 12972 - RNA, 21 nt, RNAi-antisense strand
auuggacagcucacaggccuu

SEQ ID NO: 12973 - DNA, 21 bp, Homo sapiens
gagctgtccaataactgacct

SEQ ID NO: 12974 - RNA, 21 nt, RNAi-sense strand
gcuguccaauaacugaccuuu

SEQ ID NO: 12975 - RNA, 21 nt, RNAi-antisense strand
aggucaguuauuggacagcuu

SEQ ID NO: 12976 - DNA, 21 bp, Homo sapiens
gacctgtaacttcatctaagt

SEQ ID NO: 12977 - RNA, 21 nt, RNAi-sense strand
ccuguaacuucaucuaaguuu

SEQ ID NO: 12978 - RNA, 21 nt, RNAi-antisense strand
acuuagaugaaguuacagguu

SEQ ID NO: 12979 - DNA, 21 bp, Homo sapiens
gagaagctggagacttccagc

SEQ ID NO: 12980 - RNA, 21 nt, RNAi-sense strand
gaagcuggagacuuccagcuu

SEQ ID NO: 12981 - RNA, 21 nt, RNAi-antisense strand
gcuggaagucuccagcuucuu

SEQ ID NO: 12982 - DNA, 21 bp, Homo sapiens
gaagctggagacttccagctc

SEQ ID NO: 12983 - RNA, 21 nt, RNAi-sense strand
agcuggagacuuccagcucuu

SEQ ID NO: 12984 - RNA, 21 nt, RNAi-antisense strand
gagcuggaagucuccagcuuu

SEQ ID NO: 12985 - DNA, 21 bp, Homo sapiens
gagacttccagctccagctcc

SEQ ID NO: 12986 - RNA, 21 nt, RNAi-sense strand
gacuuccagcuccagcuccuu

SEQ ID NO: 12987 - RNA, 21 nt, RNAi-antisense strand
ggagcuggagcuggaagucuu

SEQ ID NO: 12988 - DNA, 21 bp, Homo sapiens
taaggcacacagagcaccagc

SEQ ID NO: 12989 - RNA, 21 nt, RNAi-sense strand
aggcacacagagcaccagcuu

SEQ ID NO: 12990 - RNA, 21 nt, RNAi-antisense strand
gcuggugcucugugugccuuu

SEQ ID NO: 12991 - DNA, 21 bp, Homo sapiens
tatggtattatccttaactcc

SEQ ID NO: 12992 - RNA, 21 nt, RNAi-sense strand
ugguauuauccuuaacuccuu

SEQ ID NO: 12993 - RNA, 21 nt, RNAi-antisense strand
ggaguuaaggauaauaccauu

SEQ ID NO: 12994 - DNA, 21 bp, Homo sapiens
tatccttaactccatctacca

SEQ ID NO: 12995 - RNA, 21 nt, RNAi-sense strand
uccuuaacuccaucuaccauu

SEQ ID NO: 12996 - RNA, 21 nt, RNAi-antisense strand
ugguagauggaguuaaggauu

SEQ ID NO: 12997 - DNA, 21 bp, Homo sapiens
taccatccgcatgaaagatgg

SEQ ID NO: 12998 - RNA, 21 nt, RNAi-sense strand
ccauccgcaugaaagaugguu

SEQ ID NO: 12999 - RNA, 21 nt, RNAi-antisense strand
ccaucuuucaugcggaugguu

SEQ ID NO: 13000 - DNA, 21 bp, Homo sapiens
taccagcgctttctcctctac

SEQ ID NO: 13001 - RNA, 21 nt, RNAi-sense strand
ccagcgcuuucuccucuacuu

SEQ ID NO: 13002 - RNA, 21 nt, RNAi-antisense strand
guagaggagaaagcgcugguu

SEQ ID NO: 13003 - DNA, 21 bp, Homo sapiens
tacaatcgctcaccacatcct

SEQ ID NO: 13004 - RNA, 21 nt, RNAi-sense strand
caaucgcucaccacauccuuu

SEQ ID NO: 13005 - RNA, 21 nt, RNAi-antisense strand
aggauguggugagcgauuguu

SEQ ID NO: 13006 - DNA, 21 bp, Homo sapiens
tattgactcctaggaatcaag

SEQ ID NO: 13007 - RNA, 21 nt, RNAi-sense strand
uugacuccuaggaaucaaguu

SEQ ID NO: 13008 - RNA, 21 nt, RNAi-antisense strand
cuugauuccuaggagucaauu

SEQ ID NO: 13009 - DNA, 21 bp, Homo sapiens
taggaatcaagaggcctgtga

SEQ ID NO: 13010 - RNA, 21 nt, RNAi-sense strand
ggaaucaagaggccugugauu

SEQ ID NO: 13011 - RNA, 21 nt, RNAi-antisense strand
ucacaggccucuugauuccuu

SEQ ID NO: 13012 - DNA, 21 bp, Homo sapiens
taactgacctgtaacttcatc

SEQ ID NO: 13013 - RNA, 21 nt, RNAi-sense strand
acugaccuguaacuucaucuu

SEQ ID NO: 13014 - RNA, 21 nt, RNAi-antisense strand
gaugaaguuacaggucaguuu

SEQ ID NO: 13015 - DNA, 21 bp, Homo sapiens
aacattgtcttcaatatggct

SEQ ID NO: 13016 - RNA, 21 nt, RNAi-sense strand
cauugucuucaauauggcuuu

SEQ ID NO: 13017 - RNA, 21 nt, RNAi-antisense strand
agccauauugaagacaauguu

SEQ ID NO: 13018 - DNA, 21 bp, Homo sapiens
aagtgtgtggaggaattcaag

SEQ ID NO: 13019 - RNA, 21 nt, RNAi-sense strand
guguguggaggaauucaaguu

SEQ ID NO: 13020 - RNA, 21 nt, RNAi-antisense strand
cuugaauuccuccacacacuu

SEQ ID NO: 13021 - DNA, 21 bp, Homo sapiens
cacagtcaactgacaactctg

SEQ ID NO: 13022 - RNA, 21 nt, RNAi-sense strand
cagucaacugacaacucuguu

SEQ ID NO: 13023 - RNA, 21 nt, RNAi-antisense strand
cagaguugucaguugacuguu

SEQ ID NO: 13024 - DNA, 21 bp, Homo sapiens
caacattgtcttcaatatggc

SEQ ID NO: 13025 - RNA, 21 nt, RNAi-sense strand
acauugucuucaauauggcuu

SEQ ID NO: 13026 - RNA, 21 nt, RNAi-antisense strand
gccauauugaagacaauguuu

SEQ ID NO: 13027 - DNA, 21 bp, Homo sapiens
taccatccgcatgaaagatgg

SEQ ID NO: 13028 - RNA, 21 nt, RNAi-sense strand
ccauccgcaugaaagaugguu

SEQ ID NO: 13029 - RNA, 21 nt, RNAi-antisense strand
ccaucuuucaugcggaugguu

SEQ ID NO: 13030 - DNA, 21 bp, Homo sapiens
tacaatcgctcaccacatcct

SEQ ID NO: 13031 - RNA, 21 nt, RNAi-sense strand
caaucgcucaccacauccuuu

SEQ ID NO: 13032 - RNA, 21 nt, RNAi-antisense strand
aggauguggugagcgauuguu

SEQ ID NO: 13033 - DNA, 21 bp, Homo sapiens
aaggaagctccaggactggcg

SEQ ID NO: 13034 - RNA, 21 nt, RNAi-sense strand
ggaagcuccaggacuggcguu

SEQ ID NO: 13035 - RNA, 21 nt, RNAi-antisense strand
cgccaguccuggagcuuccuu

SEQ ID NO: 13036 - DNA, 21 bp, Homo sapiens
aaagtcaccaaatactttctc

SEQ ID NO: 13037 - RNA, 21 nt, RNAi-sense strand
agucaccaaauacuuucucuu

SEQ ID NO: 13038 - RNA, 21 nt, RNAi-antisense strand
gagaaaguauuuggugacuuu

SEQ ID NO: 13039 - DNA, 21 bp, Homo sapiens
aagtcaccaaatactttctct

SEQ ID NO: 13040 - RNA, 21 nt, RNAi-sense strand
gucaccaaauacuuucucuuu

SEQ ID NO: 13041 - RNA, 21 nt, RNAi-antisense strand
agagaaaguauuuggugacuu

SEQ ID NO: 13042 - DNA, 21 bp, Homo sapiens
aaatactttctcttcctcttc

SEQ ID NO: 13043 - RNA, 21 nt, RNAi-sense strand
auacuuucucuuccucuucuu

SEQ ID NO: 13044 - RNA, 21 nt, RNAi-antisense strand
gaagaggaagagaaaguauuu

SEQ ID NO: 13045 - DNA, 21 bp, Homo sapiens
aatactttctcttcctcttca

SEQ ID NO: 13046 - RNA, 21 nt, RNAi-sense strand
uacuuucucuuccucuucauu

SEQ ID NO: 13047 - RNA, 21 nt, RNAi-antisense strand
ugaagaggaagagaaaguauu

SEQ ID NO: 13048 - DNA, 21 bp, Homo sapiens
aacttgatcttctttatcctg

SEQ ID NO: 13049 - RNA, 21 nt, RNAi-sense strand
cuugaucuucuuuauccuguu

SEQ ID NO: 13050 - RNA, 21 nt, RNAi-antisense strand
caggauaaagaagaucaaguu

SEQ ID NO: 13051 - DNA, 21 bp, Homo sapiens
aagagcagtttcatctctgtc

SEQ ID NO: 13052 - RNA, 21 nt, RNAi-sense strand
gagcaguuucaucucugucuu

SEQ ID NO: 13053 - RNA, 21 nt, RNAi-antisense strand
gacagagaugaaacugcucuu

SEQ ID NO: 13054 - DNA, 21 bp, Homo sapiens
aaacctcctccagctcgctta

SEQ ID NO: 13055 - RNA, 21 nt, RNAi-sense strand
accuccuccagcucgcuuauu

SEQ ID NO: 13056 - RNA, 21 nt, RNAi-antisense strand
uaagcgagcuggaggagguuu

SEQ ID NO: 13057 - DNA, 21 bp, Homo sapiens
aacctcctccagctcgcttag

SEQ ID NO: 13058 - RNA, 21 nt, RNAi-sense strand
ccuccuccagcucgcuuaguu

SEQ ID NO: 13059 - RNA, 21 nt, RNAi-antisense strand
cuaagcgagcuggaggagguu

SEQ ID NO: 13060 - DNA, 21 bp, Homo sapiens
aacagcagtcgcgaggacagc

SEQ ID NO: 13061 - RNA, 21 nt, RNAi-sense strand
cagcagucgcgaggacagcuu

SEQ ID NO: 13062 - RNA, 21 nt, RNAi-antisense strand
gcuguccucgcgacugcuguu

SEQ ID NO: 13063 - DNA, 21 bp, Homo sapiens
aactggacagacaacgctgag

SEQ ID NO: 13064 - RNA, 21 nt, RNAi-sense strand
cuggacagacaacgcugaguu

SEQ ID NO: 13065 - RNA, 21 nt, RNAi-antisense strand
cucagcguugucuguccaguu

SEQ ID NO: 13066 - DNA, 21 bp, Homo sapiens
aacgctgagctcatgaatcgc

SEQ ID NO: 13067 - RNA, 21 nt, RNAi-sense strand
cgcugagcucaugaaucgcuu

SEQ ID NO: 13068 - RNA, 21 nt, RNAi-antisense strand
gcgauucaugagcucagcguu

SEQ ID NO: 13069 - DNA, 21 bp, Homo sapiens
aagaggacaacagcctttctg

SEQ ID NO: 13070 - RNA, 21 nt, RNAi-sense strand
gaggacaacagccuuucuguu

SEQ ID NO: 13071 - RNA, 21 nt, RNAi-antisense strand
cagaaaggcuguuguccucuu

SEQ ID NO: 13072 - DNA, 21 bp, Homo sapiens
aacagcctttctgtgaggaag

SEQ ID NO: 13073 - RNA, 21 nt, RNAi-sense strand
cagccuuucugugaggaaguu

SEQ ID NO: 13074 - RNA, 21 nt, RNAi-antisense strand
cuuccucacagaaaggcuguu

SEQ ID NO: 13075 - DNA, 21 bp, Homo sapiens
aagtactgaggcagctgctat

SEQ ID NO: 13076 - RNA, 21 nt, RNAi-sense strand
guacugaggcagcugcuauuu

SEQ ID NO: 13077 - RNA, 21 nt, RNAi-antisense strand
auagcagcugccucaguacuu

SEQ ID NO: 13078 - DNA, 21 bp, Homo sapiens
cagcgcggagcagaaagcaga

SEQ ID NO: 13079 - RNA, 21 nt, RNAi-sense strand
gcgcggagcagaaagcagauu

SEQ ID NO: 13080 - RNA, 21 nt, RNAi-antisense strand
ucugcuuucugcuccgcgcuu

SEQ ID NO: 13081 - DNA, 21 bp, Homo sapiens
cagctgcactggtttcgtgga

SEQ ID NO: 13082 - RNA, 21 nt, RNAi-sense strand
gcugcacugguuucguggauu

SEQ ID NO: 13083 - RNA, 21 nt, RNAi-antisense strand
uccacgaaaccagugcagcuu

SEQ ID NO: 13084 - DNA, 21 bp, Homo sapiens
cactggtttcgtggaaggaag

SEQ ID NO: 13085 - RNA, 21 nt, RNAi-sense strand
cugguuucguggaaggaaguu

SEQ ID NO: 13086 - RNA, 21 nt, RNAi-antisense strand
cuuccuuccacgaaaccaguu

SEQ ID NO: 13087 - DNA, 21 bp, Homo sapiens
cagcctgtatcaaagtcacca

SEQ ID NO: 13088 - RNA, 21 nt, RNAi-sense strand
gccuguaucaaagucaccauu

SEQ ID NO: 13089 - RNA, 21 nt, RNAi-antisense strand
uggugacuuugauacaggcuu

SEQ ID NO: 13090 - DNA, 21 bp, Homo sapiens
caaagtcaccaaatactttct

SEQ ID NO: 13091 - RNA, 21 nt, RNAi-sense strand
aagucaccaaauacuuucuuu

SEQ ID NO: 13092 - RNA, 21 nt, RNAi-antisense strand
agaaaguauuuggugacuuuu

SEQ ID NO: 13093 - DNA, 21 bp, Homo sapiens
caccaaatactttctcttcct

SEQ ID NO: 13094 - RNA, 21 nt, RNAi-sense strand
ccaaauacuuucucuuccuuu

SEQ ID NO: 13095 - RNA, 21 nt, RNAi-antisense strand
aggaagagaaaguauuugguu

SEQ ID NO: 13096 - DNA, 21 bp, Homo sapiens
caaatactttctcttcctctt

SEQ ID NO: 13097 - RNA, 21 nt, RNAi-sense strand
aauacuuucucuuccucuuuu

SEQ ID NO: 13098 - RNA, 21 nt, RNAi-antisense strand
aagaggaagagaaaguauuuu

SEQ ID NO: 13099 - DNA, 21 bp, Homo sapiens
caacttgatcttctttatcct

SEQ ID NO: 13100 - RNA, 21 nt, RNAi-sense strand
acuugaucuucuuuauccuuu

SEQ ID NO: 13101 - RNA, 21 nt, RNAi-antisense strand
aggauaaagaagaucaaguuu

SEQ ID NO: 13102 - DNA, 21 bp, Homo sapiens
caagagcagtttcatctctgt

SEQ ID NO: 13103 - RNA, 21 nt, RNAi-sense strand
agagcaguuucaucucuguuu

SEQ ID NO: 13104 - RNA, 21 nt, RNAi-antisense strand
acagagaugaaacugcucuuu

SEQ ID NO: 13105 - DNA, 21 bp, Homo sapiens
cagtttcatctctgtcctgca

SEQ ID NO: 13106 - RNA, 21 nt, RNAi-sense strand
guuucaucucuguccugcauu

SEQ ID NO: 13107 - RNA, 21 nt, RNAi-antisense strand
ugcaggacagagaugaaacuu

SEQ ID NO: 13108 - DNA, 21 bp, Homo sapiens
catctctgtcctgcaaacctc

SEQ ID NO: 13109 - RNA, 21 nt, RNAi-sense strand
ucucuguccugcaaaccucuu

SEQ ID NO: 13110 - RNA, 21 nt, RNAi-antisense strand
gagguuugcaggacagagauu

SEQ ID NO: 13111 - DNA, 21 bp, Homo sapiens
caaacctcctccagctcgctt

SEQ ID NO: 13112 - RNA, 21 nt, RNAi-sense strand
aaccuccuccagcucgcuuuu

SEQ ID NO: 13113 - RNA, 21 nt, RNAi-antisense strand
aagcgagcuggaggagguuuu

SEQ ID NO: 13114 - DNA, 21 bp, Homo sapiens
catcgtgactgagctcattcg

SEQ ID NO: 13115 - RNA, 21 nt, RNAi-sense strand
ucgugacugagcucauucguu

SEQ ID NO: 13116 - RNA, 21 nt, RNAi-antisense strand
cgaaugagcucagucacgauu

SEQ ID NO: 13117 - DNA, 21 bp, Homo sapiens
cattcgagactacaacagcag

SEQ ID NO: 13118 - RNA, 21 nt, RNAi-sense strand
uucgagacuacaacagcaguu

SEQ ID NO: 13119 - RNA, 21 nt, RNAi-antisense strand
cugcuguuguagucucgaauu

SEQ ID NO: 13120 - DNA, 21 bp, Homo sapiens
caacagcagtcgcgaggacag

SEQ ID NO: 13121 - RNA, 21 nt, RNAi-sense strand
acagcagucgcgaggacaguu

SEQ ID NO: 13122 - RNA, 21 nt, RNAi-antisense strand
cuguccucgcgacugcuguuu

SEQ ID NO: 13123 - DNA, 21 bp, Homo sapiens
caggctcaggtgaagtgctgc

SEQ ID NO: 13124 - RNA, 21 nt, RNAi-sense strand
ggcucaggugaagugcugcuu

SEQ ID NO: 13125 - RNA, 21 nt, RNAi-antisense strand
gcagcacuucaccugagccuu

SEQ ID NO: 13126 - DNA, 21 bp, Homo sapiens
cagcttctacaactggacaga

SEQ ID NO: 13127 - RNA, 21 nt, RNAi-sense strand
gcuucuacaacuggacagauu

SEQ ID NO: 13128 - RNA, 21 nt, RNAi-antisense strand
ucuguccaguuguagaagcuu

SEQ ID NO: 13129 - DNA, 21 bp, Homo sapiens
caactggacagacaacgctga

SEQ ID NO: 13130 - RNA, 21 nt, RNAi-sense strand
acuggacagacaacgcugauu

SEQ ID NO: 13131 - RNA, 21 nt, RNAi-antisense strand
ucagcguugucuguccaguuu

SEQ ID NO: 13132 - DNA, 21 bp, Homo sapiens
cagacaacgctgagctcatga

SEQ ID NO: 13133 - RNA, 21 nt, RNAi-sense strand
gacaacgcugagcucaugauu

SEQ ID NO: 13134 - RNA, 21 nt, RNAi-antisense strand
ucaugagcucagcguugucuu

SEQ ID NO: 13135 - DNA, 21 bp, Homo sapiens
caacgctgagctcatgaatcg

SEQ ID NO: 13136 - RNA, 21 nt, RNAi-sense strand
acgcugagcucaugaaucguu

SEQ ID NO: 13137 - RNA, 21 nt, RNAi-antisense strand
cgauucaugagcucagcguuu

SEQ ID NO: 13138 - DNA, 21 bp, Homo sapiens
caacagcctttctgtgaggaa

SEQ ID NO: 13139 - RNA, 21 nt, RNAi-sense strand
acagccuuucugugaggaauu

SEQ ID NO: 13140 - RNA, 21 nt, RNAi-antisense strand
uuccucacagaaaggcuguuu

SEQ ID NO: 13141 - DNA, 21 bp, Homo sapiens
catggagaaggtgcaggcgtg

SEQ ID NO: 13142 - RNA, 21 nt, RNAi-sense strand
uggagaaggugcaggcguguu

SEQ ID NO: 13143 - RNA, 21 nt, RNAi-antisense strand
cacgccugcaccuucuccauu

SEQ ID NO: 13144 - DNA, 21 bp, Homo sapiens
catctgcttgtgccggcacgt

SEQ ID NO: 13145 - RNA, 21 nt, RNAi-sense strand
ucugcuugugccggcacguuu

SEQ ID NO: 13146 - RNA, 21 nt, RNAi-antisense strand
acgugccggcacaagcagauu

SEQ ID NO: 13147 - DNA, 21 bp, Homo sapiens
cacgtccattccgaagactac

SEQ ID NO: 13148 - RNA, 21 nt, RNAi-sense strand
cguccauuccgaagacuacuu

SEQ ID NO: 13149 - RNA, 21 nt, RNAi-antisense strand
guagucuucggaauggacguu

SEQ ID NO: 13150 - DNA, 21 bp, Homo sapiens
cattccgaagactacagcaag

SEQ ID NO: 13151 - RNA, 21 nt, RNAi-sense strand
uuccgaagacuacagcaaguu

SEQ ID NO: 13152 - RNA, 21 nt, RNAi-antisense strand
cuugcuguagucuucggaauu

SEQ ID NO: 13153 - DNA, 21 bp, Homo sapiens
caagtactgaggcagctgcta

SEQ ID NO: 13154 - RNA, 21 nt, RNAi-sense strand
aguacugaggcagcugcuauu

SEQ ID NO: 13155 - RNA, 21 nt, RNAi-antisense strand
uagcagcugccucaguacuuu

SEQ ID NO: 13156 - DNA, 21 bp, Homo sapiens
cacgaggtcaggagatcgaga

SEQ ID NO: 13157 - RNA, 21 nt, RNAi-sense strand
cgaggucaggagaucgagauu

SEQ ID NO: 13158 - RNA, 21 nt, RNAi-antisense strand
ucucgaucuccugaccucguu

SEQ ID NO: 13159 - DNA, 21 bp, Homo sapiens
caggagatcgagaccatcctg

SEQ ID NO: 13160 - RNA, 21 nt, RNAi-sense strand
ggagaucgagaccauccuguu

SEQ ID NO: 13161 - RNA, 21 nt, RNAi-antisense strand
caggauggucucgaucuccuu

SEQ ID NO: 13162 - DNA, 21 bp, Homo sapiens
catcctggctaacatggtgaa

SEQ ID NO: 13163 - RNA, 21 nt, RNAi-sense strand
uccuggcuaacauggugaauu

SEQ ID NO: 13164 - RNA, 21 nt, RNAi-antisense strand
uucaccauguuagccaggauu

SEQ ID NO: 13165 - DNA, 21 bp, Homo sapiens
cagtgagctgagatcgtgcta

SEQ ID NO: 13166 - RNA, 21 nt, RNAi-sense strand
gugagcugagaucgugcuauu

SEQ ID NO: 13167 - RNA, 21 nt, RNAi-antisense strand
uagcacgaucucagcucacuu

SEQ ID NO: 13168 - DNA, 21 bp, Homo sapiens
gaccagctgcactggtttcgt

SEQ ID NO: 13169 - RNA, 21 nt, RNAi-sense strand
ccagcugcacugguuucguuu

SEQ ID NO: 13170 - RNA, 21 nt, RNAi-antisense strand
acgaaaccagugcagcugguu

SEQ ID NO: 13171 - DNA, 21 bp, Homo sapiens
gaaggaagctccaggactggc

SEQ ID NO: 13172 - RNA, 21 nt, RNAi-sense strand
aggaagcuccaggacuggcuu

SEQ ID NO: 13173 - RNA, 21 nt, RNAi-antisense strand
gccaguccuggagcuuccuuu

SEQ ID NO: 13174 - DNA, 21 bp, Homo sapiens
gatcctggccgacaagagcag

SEQ ID NO: 13175 - RNA, 21 nt, RNAi-sense strand
uccuggccgacaagagcaguu

SEQ ID NO: 13176 - RNA, 21 nt, RNAi-antisense strand
cugcucuugucggccaggauu

SEQ ID NO: 13177 - DNA, 21 bp, Homo sapiens
gacaagagcagtttcatctct

SEQ ID NO: 13178 - RNA, 21 nt, RNAi-sense strand
caagagcaguuucaucucuuu

SEQ ID NO: 13179 - RNA, 21 nt, RNAi-antisense strand
agagaugaaacugcucuuguu

SEQ ID NO: 13180 - DNA, 21 bp, Homo sapiens
gagcagtttcatctctgtcct

SEQ ID NO: 13181 - RNA, 21 nt, RNAi-sense strand
gcaguuucaucucuguccuuu

SEQ ID NO: 13182 - RNA, 21 nt, RNAi-antisense strand
aggacagagaugaaacugcuu

SEQ ID NO: 13183 - DNA, 21 bp, Homo sapiens
gactgagctcattcgagacta

SEQ ID NO: 13184 - RNA, 21 nt, RNAi-sense strand
cugagcucauucgagacuauu

SEQ ID NO: 13185 - RNA, 21 nt, RNAi-antisense strand
uagucucgaaugagcucaguu

SEQ ID NO: 13186 - DNA, 21 bp, Homo sapiens
gagctcattcgagactacaac

SEQ ID NO: 13187 - RNA, 21 nt, RNAi-sense strand
gcucauucgagacuacaacuu

SEQ ID NO: 13188 - RNA, 21 nt, RNAi-antisense strand
guuguagucucgaaugagcuu

SEQ ID NO: 13189 - DNA, 21 bp, Homo sapiens
gagactacaacagcagtcgcg

SEQ ID NO: 13190 - RNA, 21 nt, RNAi-sense strand
gacuacaacagcagucgcguu

SEQ ID NO: 13191 - RNA, 21 nt, RNAi-antisense strand
cgcgacugcuguuguagucuu

SEQ ID NO: 13192 - DNA, 21 bp, Homo sapiens
gactacaacagcagtcgcgag

SEQ ID NO: 13193 - RNA, 21 nt, RNAi-sense strand
cuacaacagcagucgcgaguu

SEQ ID NO: 13194 - RNA, 21 nt, RNAi-antisense strand
cucgcgacugcuguuguaguu

SEQ ID NO: 13195 - DNA, 21 bp, Homo sapiens
gactacgtgcaggctcaggtg

SEQ ID NO: 13196 - RNA, 21 nt, RNAi-sense strand
cuacgugcaggcucagguguu

SEQ ID NO: 13197 - RNA, 21 nt, RNAi-antisense strand
caccugagccugcacguaguu

SEQ ID NO: 13198 - DNA, 21 bp, Homo sapiens
gacagacaacgctgagctcat

SEQ ID NO: 13199 - RNA, 21 nt, RNAi-sense strand
cagacaacgcugagcucauuu

SEQ ID NO: 13200 - RNA, 21 nt, RNAi-antisense strand
augagcucagcguugucuguu

SEQ ID NO: 13201 - DNA, 21 bp, Homo sapiens
gacaacgctgagctcatgaat

SEQ ID NO: 13202 - RNA, 21 nt, RNAi-sense strand
caacgcugagcucaugaauuu

SEQ ID NO: 13203 - RNA, 21 nt, RNAi-antisense strand
auucaugagcucagcguuguu

SEQ ID NO: 13204 - DNA, 21 bp, Homo sapiens
gaagaggacaacagcctttct

SEQ ID NO: 13205 - RNA, 21 nt, RNAi-sense strand
agaggacaacagccuuucuuu

SEQ ID NO: 13206 - RNA, 21 nt, RNAi-antisense strand
agaaaggcuguuguccucuuu

SEQ ID NO: 13207 - DNA, 21 bp, Homo sapiens
gaggacaacagcctttctgtg

SEQ ID NO: 13208 - RNA, 21 nt, RNAi-sense strand
ggacaacagccuuucuguguu

SEQ ID NO: 13209 - RNA, 21 nt, RNAi-antisense strand
cacagaaaggcuguuguccuu

SEQ ID NO: 13210 - DNA, 21 bp, Homo sapiens
gacaacagcctttctgtgagg

SEQ ID NO: 13211 - RNA, 21 nt, RNAi-sense strand
caacagccuuucugugagguu

SEQ ID NO: 13212 - RNA, 21 nt, RNAi-antisense strand
ccucacagaaaggcuguuguu

SEQ ID NO: 13213 - DNA, 21 bp, Homo sapiens
gaggactggcctgtgtaccag

SEQ ID NO: 13214 - RNA, 21 nt, RNAi-sense strand
ggacuggccuguguaccaguu

SEQ ID NO: 13215 - RNA, 21 nt, RNAi-antisense strand
cugguacacaggccaguccuu

SEQ ID NO: 13216 - DNA, 21 bp, Homo sapiens
gactggcctgtgtaccaggag

SEQ ID NO: 13217 - RNA, 21 nt, RNAi-sense strand
cuggccuguguaccaggaguu

SEQ ID NO: 13218 - RNA, 21 nt, RNAi-antisense strand
cuccugguacacaggccaguu

SEQ ID NO: 13219 - DNA, 21 bp, Homo sapiens
gatggtcctgtccatctgctt

SEQ ID NO: 13220 - RNA, 21 nt, RNAi-sense strand
ugguccuguccaucugcuuuu

SEQ ID NO: 13221 - RNA, 21 nt, RNAi-antisense strand
aagcagauggacaggaccauu

SEQ ID NO: 13222 - DNA, 21 bp, Homo sapiens
gatctctcctggcctatccgc

SEQ ID NO: 13223 - RNA, 21 nt, RNAi-sense strand
ucucuccuggccuauccgcuu

SEQ ID NO: 13224 - RNA, 21 nt, RNAi-antisense strand
gcggauaggccaggagagauu

SEQ ID NO: 13225 - DNA, 21 bp, Homo sapiens
gatcacgaggtcaggagatcg

SEQ ID NO: 13226 - RNA, 21 nt, RNAi-sense strand
ucacgaggucaggagaucguu

SEQ ID NO: 13227 - RNA, 21 nt, RNAi-antisense strand
cgaucuccugaccucgugauu

SEQ ID NO: 13228 - DNA, 21 bp, Homo sapiens
gaggtcaggagatcgagacca

SEQ ID NO: 13229 - RNA, 21 nt, RNAi-sense strand
ggucaggagaucgagaccauu

SEQ ID NO: 13230 - RNA, 21 nt, RNAi-antisense strand
uggucucgaucuccugaccuu

SEQ ID NO: 13231 - DNA, 21 bp, Homo sapiens
gagatcgagaccatcctggct

SEQ ID NO: 13232 - RNA, 21 nt, RNAi-sense strand
gaucgagaccauccuggcuuu

SEQ ID NO: 13233 - RNA, 21 nt, RNAi-antisense strand
agccaggauggucucgaucuu

SEQ ID NO: 13234 - DNA, 21 bp, Homo sapiens
gatcgagaccatcctggctaa

SEQ ID NO: 13235 - RNA, 21 nt, RNAi-sense strand
ucgagaccauccuggcuaauu

SEQ ID NO: 13236 - RNA, 21 nt, RNAi-antisense strand
uuagccaggauggucucgauu

SEQ ID NO: 13237 - DNA, 21 bp, Homo sapiens
gagaccatcctggctaacatg

SEQ ID NO: 13238 - RNA, 21 nt, RNAi-sense strand
gaccauccuggcuaacauguu

SEQ ID NO: 13239 - RNA, 21 nt, RNAi-antisense strand
cauguuagccaggauggucuu

SEQ ID NO: 13240 - DNA, 21 bp, Homo sapiens
gaccatcctggctaacatggt

SEQ ID NO: 13241 - RNA, 21 nt, RNAi-sense strand
ccauccuggcuaacaugguuu

SEQ ID NO: 13242 - RNA, 21 nt, RNAi-antisense strand
accauguuagccaggaugguu

SEQ ID NO: 13243 - DNA, 21 bp, Homo sapiens
gaggctgaggcaggagaatgg

SEQ ID NO: 13244 - RNA, 21 nt, RNAi-sense strand
ggcugaggcaggagaaugguu

SEQ ID NO: 13245 - RNA, 21 nt, RNAi-antisense strand
ccauucuccugccucagccuu

SEQ ID NO: 13246 - DNA, 21 bp, Homo sapiens
gaggcaggagaatggtgtgaa

SEQ ID NO: 13247 - RNA, 21 nt, RNAi-sense strand
ggcaggagaauggugugaauu

SEQ ID NO: 13248 - RNA, 21 nt, RNAi-antisense strand
uucacaccauucuccugccuu

SEQ ID NO: 13249 - DNA, 21 bp, Homo sapiens
gagcggaggttgcagtgagct

SEQ ID NO: 13250 - RNA, 21 nt, RNAi-sense strand
gcggagguugcagugagcuuu

SEQ ID NO: 13251 - RNA, 21 nt, RNAi-antisense strand
agcucacugcaaccuccgcuu

SEQ ID NO: 13252 - DNA, 21 bp, Homo sapiens
gaggttgcagtgagctgagat

SEQ ID NO: 13253 - RNA, 21 nt, RNAi-sense strand
gguugcagugagcugagauuu

SEQ ID NO: 13254 - RNA, 21 nt, RNAi-antisense strand
aucucagcucacugcaaccuu

SEQ ID NO: 13255 - DNA, 21 bp, Homo sapiens
gagctgagatcgtgctactgc

SEQ ID NO: 13256 - RNA, 21 nt, RNAi-sense strand
gcugagaucgugcuacugcuu

SEQ ID NO: 13257 - RNA, 21 nt, RNAi-antisense strand
gcaguagcacgaucucagcuu

SEQ ID NO: 13258 - DNA, 21 bp, Homo sapiens
gagatcgtgctactgcactcc

SEQ ID NO: 13259 - RNA, 21 nt, RNAi-sense strand
gaucgugcuacugcacuccuu

SEQ ID NO: 13260 - RNA, 21 nt, RNAi-antisense strand
ggagugcaguagcacgaucuu

SEQ ID NO: 13261 - DNA, 21 bp, Homo sapiens
gatcgtgctactgcactccag

SEQ ID NO: 13262 - RNA, 21 nt, RNAi-sense strand
ucgugcuacugcacuccaguu

SEQ ID NO: 13263 - RNA, 21 nt, RNAi-antisense strand
cuggagugcaguagcacgauu

SEQ ID NO: 13264 - DNA, 21 bp, Homo sapiens
gacagaaagagactccgtctc

SEQ ID NO: 13265 - RNA, 21 nt, RNAi-sense strand
cagaaagagacuccgucucuu

SEQ ID NO: 13266 - RNA, 21 nt, RNAi-antisense strand
gagacggagucucuuucuguu

SEQ ID NO: 13267 - DNA, 21 bp, Homo sapiens
tactttctcttcctcttcaac

SEQ ID NO: 13268 - RNA, 21 nt, RNAi-sense strand
cuuucucuuccucuucaacuu

SEQ ID NO: 13269 - RNA, 21 nt, RNAi-antisense strand
guugaagaggaagagaaaguu

SEQ ID NO: 13270 - DNA, 21 bp, Homo sapiens
tactttgctttcctgctcctg

SEQ ID NO: 13271 - RNA, 21 nt, RNAi-sense strand
cuuugcuuuccugcuccuguu

SEQ ID NO: 13272 - RNA, 21 nt, RNAi-antisense strand
caggagcaggaaagcaaaguu

SEQ ID NO: 13273 - DNA, 21 bp, Homo sapiens
tacaacagcagtcgcgaggac

SEQ ID NO: 13274 - RNA, 21 nt, RNAi-sense strand
caacagcagucgcgaggacuu

SEQ ID NO: 13275 - RNA, 21 nt, RNAi-antisense strand
guccucgcgacugcuguuguu

SEQ ID NO: 13276 - DNA, 21 bp, Homo sapiens
tacgtgcaggctcaggtgaag

SEQ ID NO: 13277 - RNA, 21 nt, RNAi-sense strand
cgugcaggcucaggugaaguu

SEQ ID NO: 13278 - RNA, 21 nt, RNAi-antisense strand
cuucaccugagccugcacguu

SEQ ID NO: 13279 - DNA, 21 bp, Homo sapiens
tacaactggacagacaacgct

SEQ ID NO: 13280 - RNA, 21 nt, RNAi-sense strand
caacuggacagacaacgcuuu

SEQ ID NO: 13281 - RNA, 21 nt, RNAi-antisense strand
agcguugucuguccaguuguu

SEQ ID NO: 13282 - DNA, 21 bp, Homo sapiens
tagcgatctctcctggcctat

SEQ ID NO: 13283 - RNA, 21 nt, RNAi-sense strand
gcgaucucuccuggccuauuu

SEQ ID NO: 13284 - RNA, 21 nt, RNAi-antisense strand
auaggccaggagagaucgcuu

SEQ ID NO: 13285 - DNA, 21 bp, Homo sapiens
tatccgctgccagccttgagc

SEQ ID NO: 13286 - RNA, 21 nt, RNAi-sense strand
uccgcugccagccuugagcuu

SEQ ID NO: 13287 - RNA, 21 nt, RNAi-antisense strand
gcucaaggcuggcagcggauu

SEQ ID NO: 13288 - DNA, 21 bp, Homo sapiens
catcgtgactgagctcattcg

SEQ ID NO: 13289 - RNA, 21 nt, RNAi-sense strand
ucgugacugagcucauucguu

SEQ ID NO: 13290 - RNA, 21 nt, RNAi-antisense strand
cgaaugagcucagucacgauu

SEQ ID NO: 13291 - DNA, 21 bp, Homo sapiens
cattcgagactacaacagcag

SEQ ID NO: 13292 - RNA, 21 nt, RNAi-sense strand
uucgagacuacaacagcaguu

SEQ ID NO: 13293 - RNA, 21 nt, RNAi-antisense strand
cugcuguuguagucucgaauu

SEQ ID NO: 13294 - DNA, 21 bp, Homo sapiens
caactggacagacaacgctga

SEQ ID NO: 13295 - RNA, 21 nt, RNAi-sense strand
acuggacagacaacgcugauu

SEQ ID NO: 13296 - RNA, 21 nt, RNAi-antisense strand
ucagcguugucuguccaguuu

SEQ ID NO: 13297 - DNA, 21 bp, Homo sapiens
caacgctgagctcatgaatcg

SEQ ID NO: 13298 - RNA, 21 nt, RNAi-sense strand
acgcugagcucaugaaucguu

SEQ ID NO: 13299 - RNA, 21 nt, RNAi-antisense strand
cgauucaugagcucagcguuu

SEQ ID NO: 13300 - DNA, 21 bp, Homo sapiens
gagctcattcgagactacaac

SEQ ID NO: 13301 - RNA, 21 nt, RNAi-sense strand
gcucauucgagacuacaacuu

SEQ ID NO: 13302 - RNA, 21 nt, RNAi-antisense strand
guuguagucucgaaugagcuu

SEQ ID NO: 13303 - DNA, 21 bp, Homo sapiens
gacaacgctgagctcatgaat

SEQ ID NO: 13304 - RNA, 21 nt, RNAi-sense strand
caacgcugagcucaugaauuu

SEQ ID NO: 13305 - RNA, 21 nt, RNAi-antisense strand
auucaugagcucagcguuguu

SEQ ID NO: 13306 - DNA, 21 bp, Homo sapiens
tacaactggacagacaacgct

SEQ ID NO: 13307 - RNA, 21 nt, RNAi-sense strand
caacuggacagacaacgcuuu

SEQ ID NO: 13308 - RNA, 21 nt, RNAi-antisense strand
agcguugucuguccaguuguu

SEQ ID NO: 13309 - DNA, 21 bp, Homo sapiens
aagtgcctctccgacagcaga

SEQ ID NO: 13310 - RNA, 21 nt, RNAi-sense strand
gugccucuccgacagcagauu

SEQ ID NO: 13311 - RNA, 21 nt, RNAi-antisense strand
ucugcugucggagaggcacuu

SEQ ID NO: 13312 - DNA, 21 bp, Homo sapiens
aaggcaaagaccaagaagatt

SEQ ID NO: 13313 - RNA, 21 nt, RNAi-sense strand
ggcaaagaccaagaagauuuu

SEQ ID NO: 13314 - RNA, 21 nt, RNAi-antisense strand
aaucuucuuggucuuugccuu

SEQ ID NO: 13315 - DNA, 21 bp, Homo sapiens
aaagaccaagaagattgtgtt

SEQ ID NO: 13316 - RNA, 21 nt, RNAi-sense strand
agaccaagaagauuguguuuu

SEQ ID NO: 13317 - RNA, 21 nt, RNAi-antisense strand
aacacaaucuucuuggucuuu

SEQ ID NO: 13318 - DNA, 21 bp, Homo sapiens
aagaccaagaagattgtgttt

SEQ ID NO: 13319 - RNA, 21 nt, RNAi-sense strand
gaccaagaagauuguguuuuu

SEQ ID NO: 13320 - RNA, 21 nt, RNAi-antisense strand
aaacacaaucuucuuggucuu

SEQ ID NO: 13321 - DNA, 21 bp, Homo sapiens
aagaagattgtgtttgaggat

SEQ ID NO: 13322 - RNA, 21 nt, RNAi-sense strand
gaagauuguguuugaggauuu

SEQ ID NO: 13323 - RNA, 21 nt, RNAi-antisense strand
auccucaaacacaaucuucuu

SEQ ID NO: 13324 - DNA, 21 bp, Homo sapiens
aagattgtgtttgaggatgag

SEQ ID NO: 13325 - RNA, 21 nt, RNAi-sense strand
gauuguguuugaggaugaguu

SEQ ID NO: 13326 - RNA, 21 nt, RNAi-antisense strand
cucauccucaaacacaaucuu

SEQ ID NO: 13327 - DNA, 21 bp, Homo sapiens
aagaagcctattggagccatc

SEQ ID NO: 13328 - RNA, 21 nt, RNAi-sense strand
gaagccuauuggagccaucuu

SEQ ID NO: 13329 - RNA, 21 nt, RNAi-antisense strand
gauggcuccaauaggcuucuu

SEQ ID NO: 13330 - DNA, 21 bp, Homo sapiens
aacggagccgctatgtcgcag

SEQ ID NO: 13331 - RNA, 21 nt, RNAi-sense strand
cggagccgcuaugucgcaguu

SEQ ID NO: 13332 - RNA, 21 nt, RNAi-antisense strand
cugcgacauagcggcuccguu

SEQ ID NO: 13333 - DNA, 21 bp, Homo sapiens
aaagctcaggcagctggaggc

SEQ ID NO: 13334 - RNA, 21 nt, RNAi-sense strand
agcucaggcagcuggaggcuu

SEQ ID NO: 13335 - RNA, 21 nt, RNAi-antisense strand
gccuccagcugccugagcuuu

SEQ ID NO: 13336 - DNA, 21 bp, Homo sapiens
aagcgaatggatcctggcttc

SEQ ID NO: 13337 - RNA, 21 nt, RNAi-sense strand
gcgaauggauccuggcuucuu

SEQ ID NO: 13338 - RNA, 21 nt, RNAi-antisense strand
gaagccaggauccauucgcuu

SEQ ID NO: 13339 - DNA, 21 bp, Homo sapiens
aatggatcctggcttcctgga

SEQ ID NO: 13340 - RNA, 21 nt, RNAi-sense strand
uggauccuggcuuccuggauu

SEQ ID NO: 13341 - RNA, 21 nt, RNAi-antisense strand
uccaggaagccaggauccauu

SEQ ID NO: 13342 - DNA, 21 bp, Homo sapiens
aagcaggctcgctgccactac

SEQ ID NO: 13343 - RNA, 21 nt, RNAi-sense strand
gcaggcucgcugccacuacuu

SEQ ID NO: 13344 - RNA, 21 nt, RNAi-antisense strand
guaguggcagcgagccugcuu

SEQ ID NO: 13345 - DNA, 21 bp, Homo sapiens
aaactgaggcatctcaagact

SEQ ID NO: 13346 - RNA, 21 nt, RNAi-sense strand
acugaggcaucucaagacuuu

SEQ ID NO: 13347 - RNA, 21 nt, RNAi-antisense strand
agucuugagaugccucaguuu

SEQ ID NO: 13348 - DNA, 21 bp, Homo sapiens
aactgaggcatctcaagactc

SEQ ID NO: 13349 - RNA, 21 nt, RNAi-sense strand
cugaggcaucucaagacucuu

SEQ ID NO: 13350 - RNA, 21 nt, RNAi-antisense strand
gagucuugagaugccucaguu

SEQ ID NO: 13351 - DNA, 21 bp, Homo sapiens
aagactcagatccagaaattc

SEQ ID NO: 13352 - RNA, 21 nt, RNAi-sense strand
gacucagauccagaaauucuu

SEQ ID NO: 13353 - RNA, 21 nt, RNAi-antisense strand
gaauuucuggaucugagucuu

SEQ ID NO: 13354 - DNA, 21 bp, Homo sapiens
aaattcgatgaccaaggagac

SEQ ID NO: 13355 - RNA, 21 nt, RNAi-sense strand
auucgaugaccaaggagacuu

SEQ ID NO: 13356 - RNA, 21 nt, RNAi-antisense strand
gucuccuuggucaucgaauuu

SEQ ID NO: 13357 - DNA, 21 bp, Homo sapiens
aattcgatgaccaaggagaca

SEQ ID NO: 13358 - RNA, 21 nt, RNAi-sense strand
uucgaugaccaaggagacauu

SEQ ID NO: 13359 - RNA, 21 nt, RNAi-antisense strand
ugucuccuuggucaucgaauu

SEQ ID NO: 13360 - DNA, 21 bp, Homo sapiens
aaatgcctcttcagtttggac

SEQ ID NO: 13361 - RNA, 21 nt, RNAi-sense strand
augccucuucaguuuggacuu

SEQ ID NO: 13362 - RNA, 21 nt, RNAi-antisense strand
guccaaacugaagaggcauuu

SEQ ID NO: 13363 - DNA, 21 bp, Homo sapiens
aatgcctcttcagtttggact

SEQ ID NO: 13364 - RNA, 21 nt, RNAi-sense strand
ugccucuucaguuuggacuuu

SEQ ID NO: 13365 - RNA, 21 nt, RNAi-antisense strand
aguccaaacugaagaggcauu

SEQ ID NO: 13366 - DNA, 21 bp, Homo sapiens
aaggccttccaggacttcctc

SEQ ID NO: 13367 - RNA, 21 nt, RNAi-sense strand
ggccuuccaggacuuccucuu

SEQ ID NO: 13368 - RNA, 21 nt, RNAi-antisense strand
gaggaaguccuggaaggccuu

SEQ ID NO: 13369 - DNA, 21 bp, Homo sapiens
cacaaggcaaagaccaagaag

SEQ ID NO: 13370 - RNA, 21 nt, RNAi-sense strand
caaggcaaagaccaagaaguu

SEQ ID NO: 13371 - RNA, 21 nt, RNAi-antisense strand
cuucuuggucuuugccuuguu

SEQ ID NO: 13372 - DNA, 21 bp, Homo sapiens
caaggcaaagaccaagaagat

SEQ ID NO: 13373 - RNA, 21 nt, RNAi-sense strand
aggcaaagaccaagaagauuu

SEQ ID NO: 13374 - RNA, 21 nt, RNAi-antisense strand
aucuucuuggucuuugccuuu

SEQ ID NO: 13375 - DNA, 21 bp, Homo sapiens
caaagaccaagaagattgtgt

SEQ ID NO: 13376 - RNA, 21 nt, RNAi-sense strand
aagaccaagaagauuguguuu

SEQ ID NO: 13377 - RNA, 21 nt, RNAi-antisense strand
acacaaucuucuuggucuuuu

SEQ ID NO: 13378 - DNA, 21 bp, Homo sapiens
caagaagattgtgtttgagga

SEQ ID NO: 13379 - RNA, 21 nt, RNAi-sense strand
agaagauuguguuugaggauu

SEQ ID NO: 13380 - RNA, 21 nt, RNAi-antisense strand
uccucaaacacaaucuucuuu

SEQ ID NO: 13381 - DNA, 21 bp, Homo sapiens
caagaagcctattggagccat

SEQ ID NO: 13382 - RNA, 21 nt, RNAi-sense strand
agaagccuauuggagccauuu

SEQ ID NO: 13383 - RNA, 21 nt, RNAi-antisense strand
auggcuccaauaggcuucuuu

SEQ ID NO: 13384 - DNA, 21 bp, Homo sapiens
cagtgttccaggaccagtacg

SEQ ID NO: 13385 - RNA, 21 nt, RNAi-sense strand
guguuccaggaccaguacguu

SEQ ID NO: 13386 - RNA, 21 nt, RNAi-antisense strand
cguacugguccuggaacacuu

SEQ ID NO: 13387 - DNA, 21 bp, Homo sapiens
caggaccagtacggagagttc

SEQ ID NO: 13388 - RNA, 21 nt, RNAi-sense strand
ggaccaguacggagaguucuu

SEQ ID NO: 13389 - RNA, 21 nt, RNAi-antisense strand
gaacucuccguacugguccuu

SEQ ID NO: 13390 - DNA, 21 bp, Homo sapiens
cagtacggagagttcttggag

SEQ ID NO: 13391 - RNA, 21 nt, RNAi-sense strand
guacggagaguucuuggaguu

SEQ ID NO: 13392 - RNA, 21 nt, RNAi-antisense strand
cuccaagaacucuccguacuu

SEQ ID NO: 13393 - DNA, 21 bp, Homo sapiens
cacaggcaaagctcaggcagc

SEQ ID NO: 13394 - RNA, 21 nt, RNAi-sense strand
caggcaaagcucaggcagcuu

SEQ ID NO: 13395 - RNA, 21 nt, RNAi-antisense strand
gcugccugagcuuugccuguu

SEQ ID NO: 13396 - DNA, 21 bp, Homo sapiens
caggcaaagctcaggcagctg

SEQ ID NO: 13397 - RNA, 21 nt, RNAi-sense strand
ggcaaagcucaggcagcuguu

SEQ ID NO: 13398 - RNA, 21 nt, RNAi-antisense strand
cagcugccugagcuuugccuu

SEQ ID NO: 13399 - DNA, 21 bp, Homo sapiens
caaagctcaggcagctggagg

SEQ ID NO: 13400 - RNA, 21 nt, RNAi-sense strand
aagcucaggcagcuggagguu

SEQ ID NO: 13401 - RNA, 21 nt, RNAi-antisense strand
ccuccagcugccugagcuuuu

SEQ ID NO: 13402 - DNA, 21 bp, Homo sapiens
caagcaggctcgctgccacta

SEQ ID NO: 13403 - RNA, 21 nt, RNAi-sense strand
agcaggcucgcugccacuauu

SEQ ID NO: 13404 - RNA, 21 nt, RNAi-antisense strand
uaguggcagcgagccugcuuu

SEQ ID NO: 13405 - DNA, 21 bp, Homo sapiens
catctcaagactcagatccag

SEQ ID NO: 13406 - RNA, 21 nt, RNAi-sense strand
ucucaagacucagauccaguu

SEQ ID NO: 13407 - RNA, 21 nt, RNAi-antisense strand
cuggaucugagucuugagauu

SEQ ID NO: 13408 - DNA, 21 bp, Homo sapiens
caagactcagatccagaaatt

SEQ ID NO: 13409 - RNA, 21 nt, RNAi-sense strand
agacucagauccagaaauuuu

SEQ ID NO: 13410 - RNA, 21 nt, RNAi-antisense strand
aauuucuggaucugagucuuu

SEQ ID NO: 13411 - DNA, 21 bp, Homo sapiens
cagatccagaaattcgatgac

SEQ ID NO: 13412 - RNA, 21 nt, RNAi-sense strand
gauccagaaauucgaugacuu

SEQ ID NO: 13413 - RNA, 21 nt, RNAi-antisense strand
gucaucgaauuucuggaucuu

SEQ ID NO: 13414 - DNA, 21 bp, Homo sapiens
cagaaattcgatgaccaagga

SEQ ID NO: 13415 - RNA, 21 nt, RNAi-sense strand
gaaauucgaugaccaaggauu

SEQ ID NO: 13416 - RNA, 21 nt, RNAi-antisense strand
uccuuggucaucgaauuucuu

SEQ ID NO: 13417 - DNA, 21 bp, Homo sapiens
catttcttggtatctctcagc

SEQ ID NO: 13418 - RNA, 21 nt, RNAi-sense strand
uuucuugguaucucucagcuu

SEQ ID NO: 13419 - RNA, 21 nt, RNAi-antisense strand
gcugagagauaccaagaaauu

SEQ ID NO: 13420 - DNA, 21 bp, Homo sapiens
caaatgcctcttcagtttgga

SEQ ID NO: 13421 - RNA, 21 nt, RNAi-sense strand
aaugccucuucaguuuggauu

SEQ ID NO: 13422 - RNA, 21 nt, RNAi-antisense strand
uccaaacugaagaggcauuuu

SEQ ID NO: 13423 - DNA, 21 bp, Homo sapiens
cagtttggactcagctctgac

SEQ ID NO: 13424 - RNA, 21 nt, RNAi-sense strand
guuuggacucagcucugacuu

SEQ ID NO: 13425 - RNA, 21 nt, RNAi-antisense strand
gucagagcugaguccaaacuu

SEQ ID NO: 13426 - DNA, 21 bp, Homo sapiens
caggaaggccttccaggactt

SEQ ID NO: 13427 - RNA, 21 nt, RNAi-sense strand
ggaaggccuuccaggacuuuu

SEQ ID NO: 13428 - RNA, 21 nt, RNAi-antisense strand
aaguccuggaaggccuuccuu

SEQ ID NO: 13429 - DNA, 21 bp, Homo sapiens
gacggaagtgcctctccgaca

SEQ ID NO: 13430 - RNA, 21 nt, RNAi-sense strand
cggaagugccucuccgacauu

SEQ ID NO: 13431 - RNA, 21 nt, RNAi-antisense strand
ugucggagaggcacuuccguu

SEQ ID NO: 13432 - DNA, 21 bp, Homo sapiens
gaagtgcctctccgacagcag

SEQ ID NO: 13433 - RNA, 21 nt, RNAi-sense strand
agugccucuccgacagcaguu

SEQ ID NO: 13434 - RNA, 21 nt, RNAi-antisense strand
cugcugucggagaggcacuuu

SEQ ID NO: 13435 - DNA, 21 bp, Homo sapiens
gacagcagatccaggctcgga

SEQ ID NO: 13436 - RNA, 21 nt, RNAi-sense strand
cagcagauccaggcucggauu

SEQ ID NO: 13437 - RNA, 21 nt, RNAi-antisense strand
uccgagccuggaucugcuguu

SEQ ID NO: 13438 - DNA, 21 bp, Homo sapiens
gaccaagaagattgtgtttga

SEQ ID NO: 13439 - RNA, 21 nt, RNAi-sense strand
ccaagaagauuguguuugauu

SEQ ID NO: 13440 - RNA, 21 nt, RNAi-antisense strand
ucaaacacaaucuucuugguu

SEQ ID NO: 13441 - DNA, 21 bp, Homo sapiens
gaagattgtgtttgaggatga

SEQ ID NO: 13442 - RNA, 21 nt, RNAi-sense strand
agauuguguuugaggaugauu

SEQ ID NO: 13443 - RNA, 21 nt, RNAi-antisense strand
ucauccucaaacacaaucuuu

SEQ ID NO: 13444 - DNA, 21 bp, Homo sapiens
gattgtgtttgaggatgagtt

SEQ ID NO: 13445 - RNA, 21 nt, RNAi-sense strand
uuguguuugaggaugaguuuu

SEQ ID NO: 13446 - RNA, 21 nt, RNAi-antisense strand
aacucauccucaaacacaauu

SEQ ID NO: 13447 - DNA, 21 bp, Homo sapiens
gaacggagccgctatgtcgca

SEQ ID NO: 13448 - RNA, 21 nt, RNAi-sense strand
acggagccgcuaugucgcauu

SEQ ID NO: 13449 - RNA, 21 nt, RNAi-antisense strand
ugcgacauagcggcuccguuu

SEQ ID NO: 13450 - DNA, 21 bp, Homo sapiens
gagccgctatgtcgcagtgtt

SEQ ID NO: 13451 - RNA, 21 nt, RNAi-sense strand
gccgcuaugucgcaguguuuu

SEQ ID NO: 13452 - RNA, 21 nt, RNAi-antisense strand
aacacugcgacauagcggcuu

SEQ ID NO: 13453 - DNA, 21 bp, Homo sapiens
gaccagtacggagagttcttg

SEQ ID NO: 13454 - RNA, 21 nt, RNAi-sense strand
ccaguacggagaguucuuguu

SEQ ID NO: 13455 - RNA, 21 nt, RNAi-antisense strand
caagaacucuccguacugguu

SEQ ID NO: 13456 - DNA, 21 bp, Homo sapiens
gagagttcttggagctccagc

SEQ ID NO: 13457 - RNA, 21 nt, RNAi-sense strand
gaguucuuggagcuccagcuu

SEQ ID NO: 13458 - RNA, 21 nt, RNAi-antisense strand
gcuggagcuccaagaacucuu

SEQ ID NO: 13459 - DNA, 21 bp, Homo sapiens
gagttcttggagctccagcac

SEQ ID NO: 13460 - RNA, 21 nt, RNAi-sense strand
guucuuggagcuccagcacuu

SEQ ID NO: 13461 - RNA, 21 nt, RNAi-antisense strand
gugcuggagcuccaagaacuu

SEQ ID NO: 13462 - DNA, 21 bp, Homo sapiens
gagtttgagatgaagcgaatg

SEQ ID NO: 13463 - RNA, 21 nt, RNAi-sense strand
guuugagaugaagcgaauguu

SEQ ID NO: 13464 - RNA, 21 nt, RNAi-antisense strand
cauucgcuucaucucaaacuu

SEQ ID NO: 13465 - DNA, 21 bp, Homo sapiens
gagatgaagcgaatggatcct

SEQ ID NO: 13466 - RNA, 21 nt, RNAi-sense strand
gaugaagcgaauggauccuuu

SEQ ID NO: 13467 - RNA, 21 nt, RNAi-antisense strand
aggauccauucgcuucaucuu

SEQ ID NO: 13468 - DNA, 21 bp, Homo sapiens
gatgaagcgaatggatcctgg

SEQ ID NO: 13469 - RNA, 21 nt, RNAi-sense strand
ugaagcgaauggauccugguu

SEQ ID NO: 13470 - RNA, 21 nt, RNAi-antisense strand
ccaggauccauucgcuucauu

SEQ ID NO: 13471 - DNA, 21 bp, Homo sapiens
gaagcgaatggatcctggctt

SEQ ID NO: 13472 - RNA, 21 nt, RNAi-sense strand
agcgaauggauccuggcuuuu

SEQ ID NO: 13473 - RNA, 21 nt, RNAi-antisense strand
aagccaggauccauucgcuuu

SEQ ID NO: 13474 - DNA, 21 bp, Homo sapiens
gaatggatcctggcttcctgg

SEQ ID NO: 13475 - RNA, 21 nt, RNAi-sense strand
auggauccuggcuuccugguu

SEQ ID NO: 13476 - RNA, 21 nt, RNAi-antisense strand
ccaggaagccaggauccauuu

SEQ ID NO: 13477 - DNA, 21 bp, Homo sapiens
gatcctggcttcctggacaag

SEQ ID NO: 13478 - RNA, 21 nt, RNAi-sense strand
uccuggcuuccuggacaaguu

SEQ ID NO: 13479 - RNA, 21 nt, RNAi-antisense strand
cuuguccaggaagccaggauu

SEQ ID NO: 13480 - DNA, 21 bp, Homo sapiens
gaggcatctcaagactcagat

SEQ ID NO: 13481 - RNA, 21 nt, RNAi-sense strand
ggcaucucaagacucagauuu

SEQ ID NO: 13482 - RNA, 21 nt, RNAi-antisense strand
aucugagucuugagaugccuu

SEQ ID NO: 13483 - DNA, 21 bp, Homo sapiens
gactcagatccagaaattcga

SEQ ID NO: 13484 - RNA, 21 nt, RNAi-sense strand
cucagauccagaaauucgauu

SEQ ID NO: 13485 - RNA, 21 nt, RNAi-antisense strand
ucgaauuucuggaucugaguu

SEQ ID NO: 13486 - DNA, 21 bp, Homo sapiens
gatccagaaattcgatgacca

SEQ ID NO: 13487 - RNA, 21 nt, RNAi-sense strand
uccagaaauucgaugaccauu

SEQ ID NO: 13488 - RNA, 21 nt, RNAi-antisense strand
uggucaucgaauuucuggauu

SEQ ID NO: 13489 - DNA, 21 bp, Homo sapiens
gaaattcgatgaccaaggaga

SEQ ID NO: 13490 - RNA, 21 nt, RNAi-sense strand
aauucgaugaccaaggagauu

SEQ ID NO: 13491 - RNA, 21 nt, RNAi-antisense strand
ucuccuuggucaucgaauuuu

SEQ ID NO: 13492 - DNA, 21 bp, Homo sapiens
gatgaccaaggagacagcgag

SEQ ID NO: 13493 - RNA, 21 nt, RNAi-sense strand
ugaccaaggagacagcgaguu

SEQ ID NO: 13494 - RNA, 21 nt, RNAi-antisense strand
cucgcugucuccuuggucauu

SEQ ID NO: 13495 - DNA, 21 bp, Homo sapiens
gattgcaaatgcctcttcagt

SEQ ID NO: 13496 - RNA, 21 nt, RNAi-sense strand
uugcaaaugccucuucaguuu

SEQ ID NO: 13497 - RNA, 21 nt, RNAi-antisense strand
acugaagaggcauuugcaauu

SEQ ID NO: 13498 - DNA, 21 bp, Homo sapiens
gaaggccttccaggacttcct

SEQ ID NO: 13499 - RNA, 21 nt, RNAi-sense strand
aggccuuccaggacuuccuuu

SEQ ID NO: 13500 - RNA, 21 nt, RNAi-antisense strand
aggaaguccuggaaggccuuu

SEQ ID NO: 13501 - DNA, 21 bp, Homo sapiens
gactccagatctcaacctgtt

SEQ ID NO: 13502 - RNA, 21 nt, RNAi-sense strand
cuccagaucucaaccuguuuu

SEQ ID NO: 13503 - RNA, 21 nt, RNAi-antisense strand
aacagguugagaucuggaguu

SEQ ID NO: 13504 - DNA, 21 bp, Homo sapiens
tatgtcgcagtgttccaggac

SEQ ID NO: 13505 - RNA, 21 nt, RNAi-sense strand
ugucgcaguguuccaggacuu

SEQ ID NO: 13506 - RNA, 21 nt, RNAi-antisense strand
guccuggaacacugcgacauu

SEQ ID NO: 13507 - DNA, 21 bp, Homo sapiens
tacggagagttcttggagctc

SEQ ID NO: 13508 - RNA, 21 nt, RNAi-sense strand
cggagaguucuuggagcucuu

SEQ ID NO: 13509 - RNA, 21 nt, RNAi-antisense strand
gagcuccaagaacucuccguu

SEQ ID NO: 13510 - DNA, 21 bp, Homo sapiens
taaactgaggcatctcaagac

SEQ ID NO: 13511 - RNA, 21 nt, RNAi-sense strand
aacugaggcaucucaagacuu

SEQ ID NO: 13512 - RNA, 21 nt, RNAi-antisense strand
gucuugagaugccucaguuuu

SEQ ID NO: 13513 - DNA, 21 bp, Homo sapiens
aaagaccaagaagattgtgtt

SEQ ID NO: 13514 - RNA, 21 nt, RNAi-sense strand
agaccaagaagauuguguuuu

SEQ ID NO: 13515 - RNA, 21 nt, RNAi-antisense strand
aacacaaucuucuuggucuuu

SEQ ID NO: 13516 - DNA, 21 bp, Homo sapiens
aagaccaagaagattgtgttt

SEQ ID NO: 13517 - RNA, 21 nt, RNAi-sense strand
gaccaagaagauuguguuuuu

SEQ ID NO: 13518 - RNA, 21 nt, RNAi-antisense strand
aaacacaaucuucuuggucuu

SEQ ID NO: 13519 - DNA, 21 bp, Homo sapiens
caaagaccaagaagattgtgt

SEQ ID NO: 13520 - RNA, 21 nt, RNAi-sense strand
aagaccaagaagauuguguuu

SEQ ID NO: 13521 - RNA, 21 nt, RNAi-antisense strand
acacaaucuucuuggucuuuu

SEQ ID NO: 13522 - DNA, 21 bp, Homo sapiens
cagtacggagagttcttggag

SEQ ID NO: 13523 - RNA, 21 nt, RNAi-sense strand
guacggagaguucuuggaguu

SEQ ID NO: 13524 - RNA, 21 nt, RNAi-antisense strand
cuccaagaacucuccguacuu

SEQ ID NO: 13525 - DNA, 21 bp, Homo sapiens
gaccaagaagattgtgtttga

SEQ ID NO: 13526 - RNA, 21 nt, RNAi-sense strand
ccaagaagauuguguuugauu

SEQ ID NO: 13527 - RNA, 21 nt, RNAi-antisense strand
ucaaacacaaucuucuugguu

SEQ ID NO: 13528 - DNA, 21 bp, Homo sapiens
gaccagtacggagagttcttg

SEQ ID NO: 13529 - RNA, 21 nt, RNAi-sense strand
ccaguacggagaguucuuguu

SEQ ID NO: 13530 - RNA, 21 nt, RNAi-antisense strand
caagaacucuccguacugguu

SEQ ID NO: 13531 - DNA, 21 bp, Homo sapiens
gagtttgagatgaagcgaatg

SEQ ID NO: 13532 - RNA, 21 nt, RNAi-sense strand
guuugagaugaagcgaauguu

SEQ ID NO: 13533 - RNA, 21 nt, RNAi-antisense strand
cauucgcuucaucucaaacuu

SEQ ID NO: 13534 - DNA, 21 bp, Homo sapiens
aaattctgcactttgacagtg

SEQ ID NO: 13535 - RNA, 21 nt, RNAi-sense strand
auucugcacuuugacaguguu

SEQ ID NO: 13536 - RNA, 21 nt, RNAi-antisense strand
cacugucaaagugcagaauuu

SEQ ID NO: 13537 - DNA, 21 bp, Homo sapiens
aattctgcactttgacagtgg

SEQ ID NO: 13538 - RNA, 21 nt, RNAi-sense strand
uucugcacuuugacagugguu

SEQ ID NO: 13539 - RNA, 21 nt, RNAi-antisense strand
ccacugucaaagugcagaauu

SEQ ID NO: 13540 - DNA, 21 bp, Homo sapiens
aaagcataaatcatggacacc

SEQ ID NO: 13541 - RNA, 21 nt, RNAi-sense strand
agcauaaaucauggacaccuu

SEQ ID NO: 13542 - RNA, 21 nt, RNAi-antisense strand
gguguccaugauuuaugcuuu

SEQ ID NO: 13543 - DNA, 21 bp, Homo sapiens
aagcataaatcatggacacca

SEQ ID NO: 13544 - RNA, 21 nt, RNAi-sense strand
gcauaaaucauggacaccauu

SEQ ID NO: 13545 - RNA, 21 nt, RNAi-antisense strand
ugguguccaugauuuaugcuu

SEQ ID NO: 13546 - DNA, 21 bp, Homo sapiens
aaatcatggacaccagagaat

SEQ ID NO: 13547 - RNA, 21 nt, RNAi-sense strand
aucauggacaccagagaauuu

SEQ ID NO: 13548 - RNA, 21 nt, RNAi-antisense strand
auucucugguguccaugauuu

SEQ ID NO: 13549 - DNA, 21 bp, Homo sapiens
aatcatggacaccagagaata

SEQ ID NO: 13550 - RNA, 21 nt, RNAi-sense strand
ucauggacaccagagaauauu

SEQ ID NO: 13551 - RNA, 21 nt, RNAi-antisense strand
uauucucugguguccaugauu

SEQ ID NO: 13552 - DNA, 21 bp, Homo sapiens
aataaggtggacctcaggaat

SEQ ID NO: 13553 - RNA, 21 nt, RNAi-sense strand
uaagguggaccucaggaauuu

SEQ ID NO: 13554 - RNA, 21 nt, RNAi-antisense strand
auuccugagguccaccuuauu

SEQ ID NO: 13555 - DNA, 21 bp, Homo sapiens
aaggtggacctcaggaatccg

SEQ ID NO: 13556 - RNA, 21 nt, RNAi-sense strand
gguggaccucaggaauccguu

SEQ ID NO: 13557 - RNA, 21 nt, RNAi-antisense strand
cggauuccugagguccaccuu

SEQ ID NO: 13558 - DNA, 21 bp, Homo sapiens
aaagactgagaagcttacatt

SEQ ID NO: 13559 - RNA, 21 nt, RNAi-sense strand
agacugagaagcuuacauuuu

SEQ ID NO: 13560 - RNA, 21 nt, RNAi-antisense strand
aauguaagcuucucagucuuu

SEQ ID NO: 13561 - DNA, 21 bp, Homo sapiens
aagactgagaagcttacattc

SEQ ID NO: 13562 - RNA, 21 nt, RNAi-sense strand
gacugagaagcuuacauucuu

SEQ ID NO: 13563 - RNA, 21 nt, RNAi-antisense strand
gaauguaagcuucucagucuu

SEQ ID NO: 13564 - DNA, 21 bp, Homo sapiens
aagcttacattcttcctctag

SEQ ID NO: 13565 - RNA, 21 nt, RNAi-sense strand
gcuuacauucuuccucuaguu

SEQ ID NO: 13566 - RNA, 21 nt, RNAi-antisense strand
cuagaggaagaauguaagcuu

SEQ ID NO: 13567 - DNA, 21 bp, Homo sapiens
aaacatgagttgtgtgccatg

SEQ ID NO: 13568 - RNA, 21 nt, RNAi-sense strand
acaugaguugugugccauguu

SEQ ID NO: 13569 - RNA, 21 nt, RNAi-antisense strand
cauggcacacaacucauguuu

SEQ ID NO: 13570 - DNA, 21 bp, Homo sapiens
aacatgagttgtgtgccatgg

SEQ ID NO: 13571 - RNA, 21 nt, RNAi-sense strand
caugaguugugugccaugguu

SEQ ID NO: 13572 - RNA, 21 nt, RNAi-antisense strand
ccauggcacacaacucauguu

SEQ ID NO: 13573 - DNA, 21 bp, Homo sapiens
aaaggagacaaggccaaatct

SEQ ID NO: 13574 - RNA, 21 nt, RNAi-sense strand
aggagacaaggccaaaucuuu

SEQ ID NO: 13575 - RNA, 21 nt, RNAi-antisense strand
agauuuggccuugucuccuuu

SEQ ID NO: 13576 - DNA, 21 bp, Homo sapiens
aaggagacaaggccaaatctg

SEQ ID NO: 13577 - RNA, 21 nt, RNAi-sense strand
ggagacaaggccaaaucuguu

SEQ ID NO: 13578 - RNA, 21 nt, RNAi-antisense strand
cagauuuggccuugucuccuu

SEQ ID NO: 13579 - DNA, 21 bp, Homo sapiens
aaggccaaatctgaatcattg

SEQ ID NO: 13580 - RNA, 21 nt, RNAi-sense strand
ggccaaaucugaaucauuguu

SEQ ID NO: 13581 - RNA, 21 nt, RNAi-antisense strand
caaugauucagauuuggccuu

SEQ ID NO: 13582 - DNA, 21 bp, Homo sapiens
aaatctgaatcattggagctg

SEQ ID NO: 13583 - RNA, 21 nt, RNAi-sense strand
aucugaaucauuggagcuguu

SEQ ID NO: 13584 - RNA, 21 nt, RNAi-antisense strand
cagcuccaaugauucagauuu

SEQ ID NO: 13585 - DNA, 21 bp, Homo sapiens
aatctgaatcattggagctgc

SEQ ID NO: 13586 - RNA, 21 nt, RNAi-sense strand
ucugaaucauuggagcugcuu

SEQ ID NO: 13587 - RNA, 21 nt, RNAi-antisense strand
gcagcuccaaugauucagauu

SEQ ID NO: 13588 - DNA, 21 bp, Homo sapiens
aaatctaccatgagaaacagc

SEQ ID NO: 13589 - RNA, 21 nt, RNAi-sense strand
aucuaccaugagaaacagcuu

SEQ ID NO: 13590 - RNA, 21 nt, RNAi-antisense strand
gcuguuucucaugguagauuu

SEQ ID NO: 13591 - DNA, 21 bp, Homo sapiens
aatctaccatgagaaacagcg

SEQ ID NO: 13592 - RNA, 21 nt, RNAi-sense strand
ucuaccaugagaaacagcguu

SEQ ID NO: 13593 - RNA, 21 nt, RNAi-antisense strand
cgcuguuucucaugguagauu

SEQ ID NO: 13594 - DNA, 21 bp, Homo sapiens
aataacgtcttccaggacagc

SEQ ID NO: 13595 - RNA, 21 nt, RNAi-sense strand
uaacgucuuccaggacagcuu

SEQ ID NO: 13596 - RNA, 21 nt, RNAi-antisense strand
gcuguccuggaagacguuauu

SEQ ID NO: 13597 - DNA, 21 bp, Homo sapiens
aacgtcttccaggacagcaat

SEQ ID NO: 13598 - RNA, 21 nt, RNAi-sense strand
cgucuuccaggacagcaauuu

SEQ ID NO: 13599 - RNA, 21 nt, RNAi-antisense strand
auugcuguccuggaagacguu

SEQ ID NO: 13600 - DNA, 21 bp, Homo sapiens
aaacaccatggtgacacctca

SEQ ID NO: 13601 - RNA, 21 nt, RNAi-sense strand
acaccauggugacaccucauu

SEQ ID NO: 13602 - RNA, 21 nt, RNAi-antisense strand
ugaggugucaccaugguguuu

SEQ ID NO: 13603 - DNA, 21 bp, Homo sapiens
aacaccatggtgacacctcac

SEQ ID NO: 13604 - RNA, 21 nt, RNAi-sense strand
caccauggugacaccucacuu

SEQ ID NO: 13605 - RNA, 21 nt, RNAi-antisense strand
gugaggugucaccaugguguu

SEQ ID NO: 13606 - DNA, 21 bp, Homo sapiens
aaatggcaactacgatgtgaa

SEQ ID NO: 13607 - RNA, 21 nt, RNAi-sense strand
auggcaacuacgaugugaauu

SEQ ID NO: 13608 - RNA, 21 nt, RNAi-antisense strand
uucacaucguaguugccauuu

SEQ ID NO: 13609 - DNA, 21 bp, Homo sapiens
aatggcaactacgatgtgaat

SEQ ID NO: 13610 - RNA, 21 nt, RNAi-sense strand
uggcaacuacgaugugaauuu

SEQ ID NO: 13611 - RNA, 21 nt, RNAi-antisense strand
auucacaucguaguugccauu

SEQ ID NO: 13612 - DNA, 21 bp, Homo sapiens
aactacgatgtgaatgtcatt

SEQ ID NO: 13613 - RNA, 21 nt, RNAi-sense strand
cuacgaugugaaugucauuuu

SEQ ID NO: 13614 - RNA, 21 nt, RNAi-antisense strand
aaugacauucacaucguaguu

SEQ ID NO: 13615 - DNA, 21 bp, Homo sapiens
aatgtcattatggcagcactt

SEQ ID NO: 13616 - RNA, 21 nt, RNAi-sense strand
ugucauuauggcagcacuuuu

SEQ ID NO: 13617 - RNA, 21 nt, RNAi-antisense strand
aagugcugccauaaugacauu

SEQ ID NO: 13618 - DNA, 21 bp, Homo sapiens
aaaggctatgaagctgtttgg

SEQ ID NO: 13619 - RNA, 21 nt, RNAi-sense strand
aggcuaugaagcuguuugguu

SEQ ID NO: 13620 - RNA, 21 nt, RNAi-antisense strand
ccaaacagcuucauagccuuu

SEQ ID NO: 13621 - DNA, 21 bp, Homo sapiens
aaggctatgaagctgtttggt

SEQ ID NO: 13622 - RNA, 21 nt, RNAi-sense strand
ggcuaugaagcuguuugguuu

SEQ ID NO: 13623 - RNA, 21 nt, RNAi-antisense strand
accaaacagcuucauagccuu

SEQ ID NO: 13624 - DNA, 21 bp, Homo sapiens
aaaggcagcactggatctgtg

SEQ ID NO: 13625 - RNA, 21 nt, RNAi-sense strand
aggcagcacuggaucuguguu

SEQ ID NO: 13626 - RNA, 21 nt, RNAi-antisense strand
cacagauccagugcugccuuu

SEQ ID NO: 13627 - DNA, 21 bp, Homo sapiens
aaggcagcactggatctgtgt

SEQ ID NO: 13628 - RNA, 21 nt, RNAi-sense strand
ggcagcacuggaucuguguuu

SEQ ID NO: 13629 - RNA, 21 nt, RNAi-antisense strand
acacagauccagugcugccuu

SEQ ID NO: 13630 - DNA, 21 bp, Homo sapiens
aacctcgactccaaactcaag

SEQ ID NO: 13631 - RNA, 21 nt, RNAi-sense strand
ccucgacuccaaacucaaguu

SEQ ID NO: 13632 - RNA, 21 nt, RNAi-antisense strand
cuugaguuuggagucgagguu

SEQ ID NO: 13633 - DNA, 21 bp, Homo sapiens
aaacatcatttgcgaggaaag

SEQ ID NO: 13634 - RNA, 21 nt, RNAi-sense strand
acaucauuugcgaggaaaguu

SEQ ID NO: 13635 - RNA, 21 nt, RNAi-antisense strand
cuuuccucgcaaaugauguuu

SEQ ID NO: 13636 - DNA, 21 bp, Homo sapiens
aacatcatttgcgaggaaaga

SEQ ID NO: 13637 - RNA, 21 nt, RNAi-sense strand
caucauuugcgaggaaagauu

SEQ ID NO: 13638 - RNA, 21 nt, RNAi-antisense strand
ucuuuccucgcaaaugauguu

SEQ ID NO: 13639 - DNA, 21 bp, Homo sapiens
aaagaactgtgaactcctgct

SEQ ID NO: 13640 - RNA, 21 nt, RNAi-sense strand
agaacugugaacuccugcuuu

SEQ ID NO: 13641 - RNA, 21 nt, RNAi-antisense strand
agcaggaguucacaguucuuu

SEQ ID NO: 13642 - DNA, 21 bp, Homo sapiens
aagaactgtgaactcctgctg

SEQ ID NO: 13643 - RNA, 21 nt, RNAi-sense strand
gaacugugaacuccugcuguu

SEQ ID NO: 13644 - RNA, 21 nt, RNAi-antisense strand
cagcaggaguucacaguucuu

SEQ ID NO: 13645 - DNA, 21 bp, Homo sapiens
aactgtgaactcctgctggtg

SEQ ID NO: 13646 - RNA, 21 nt, RNAi-sense strand
cugugaacuccugcugguguu

SEQ ID NO: 13647 - RNA, 21 nt, RNAi-antisense strand
caccagcaggaguucacaguu

SEQ ID NO: 13648 - DNA, 21 bp, Homo sapiens
aactcctgctggtggtaccag

SEQ ID NO: 13649 - RNA, 21 nt, RNAi-sense strand
cuccugcuggugguaccaguu

SEQ ID NO: 13650 - RNA, 21 nt, RNAi-antisense strand
cugguaccaccagcaggaguu

SEQ ID NO: 13651 - DNA, 21 bp, Homo sapiens
aagaggtagaggctcatcaga

SEQ ID NO: 13652 - RNA, 21 nt, RNAi-sense strand
gagguagaggcucaucagauu

SEQ ID NO: 13653 - RNA, 21 nt, RNAi-antisense strand
ucugaugagccucuaccucuu

SEQ ID NO: 13654 - DNA, 21 bp, Homo sapiens
aataggacagacgtgtggact

SEQ ID NO: 13655 - RNA, 21 nt, RNAi-sense strand
uaggacagacguguggacuuu

SEQ ID NO: 13656 - RNA, 21 nt, RNAi-antisense strand
aguccacacgucuguccuauu

SEQ ID NO: 13657 - DNA, 21 bp, Homo sapiens
aaggaaggtaggagttctgtg

SEQ ID NO: 13658 - RNA, 21 nt, RNAi-sense strand
ggaagguaggaguucuguguu

SEQ ID NO: 13659 - RNA, 21 nt, RNAi-antisense strand
cacagaacuccuaccuuccuu

SEQ ID NO: 13660 - DNA, 21 bp, Homo sapiens
aaggtaggagttctgtgcact

SEQ ID NO: 13661 - RNA, 21 nt, RNAi-sense strand
gguaggaguucugugcacuuu

SEQ ID NO: 13662 - RNA, 21 nt, RNAi-antisense strand
agugcacagaacuccuaccuu

SEQ ID NO: 13663 - DNA, 21 bp, Homo sapiens
aagagacagaggagaaagtgg

SEQ ID NO: 13664 - RNA, 21 nt, RNAi-sense strand
gagacagaggagaaagugguu

SEQ ID NO: 13665 - RNA, 21 nt, RNAi-antisense strand
ccacuuucuccucugucucuu

SEQ ID NO: 13666 - DNA, 21 bp, Homo sapiens
aaaggtctctcaggaaaccat

SEQ ID NO: 13667 - RNA, 21 nt, RNAi-sense strand
aggucucucaggaaaccauuu

SEQ ID NO: 13668 - RNA, 21 nt, RNAi-antisense strand
augguuuccugagagaccuuu

SEQ ID NO: 13669 - DNA, 21 bp, Homo sapiens
aaggtctctcaggaaaccatg

SEQ ID NO: 13670 - RNA, 21 nt, RNAi-sense strand
ggucucucaggaaaccauguu

SEQ ID NO: 13671 - RNA, 21 nt, RNAi-antisense strand
caugguuuccugagagaccuu

SEQ ID NO: 13672 - DNA, 21 bp, Homo sapiens
aatggcaccatctcggctcac

SEQ ID NO: 13673 - RNA, 21 nt, RNAi-sense strand
uggcaccaucucggcucacuu

SEQ ID NO: 13674 - RNA, 21 nt, RNAi-antisense strand
gugagccgagauggugccauu

SEQ ID NO: 13675 - DNA, 21 bp, Homo sapiens
aacctccacctcctggttcaa

SEQ ID NO: 13676 - RNA, 21 nt, RNAi-sense strand
ccuccaccuccugguucaauu

SEQ ID NO: 13677 - RNA, 21 nt, RNAi-antisense strand
uugaaccaggagguggagguu

SEQ ID NO: 13678 - DNA, 21 bp, Homo sapiens
aagcgattctcaggcctcagc

SEQ ID NO: 13679 - RNA, 21 nt, RNAi-sense strand
gcgauucucaggccucagcuu

SEQ ID NO: 13680 - RNA, 21 nt, RNAi-antisense strand
gcugaggccugagaaucgcuu

SEQ ID NO: 13681 - DNA, 21 bp, Homo sapiens
aagtgaggaggatactgaaca

SEQ ID NO: 13682 - RNA, 21 nt, RNAi-sense strand
gugaggaggauacugaacauu

SEQ ID NO: 13683 - RNA, 21 nt, RNAi-antisense strand
uguucaguauccuccucacuu

SEQ ID NO: 13684 - DNA, 21 bp, Homo sapiens
aacaggatgtggctaaagcca

SEQ ID NO: 13685 - RNA, 21 nt, RNAi-sense strand
caggauguggcuaaagccauu

SEQ ID NO: 13686 - RNA, 21 nt, RNAi-antisense strand
uggcuuuagccacauccuguu

SEQ ID NO: 13687 - DNA, 21 bp, Homo sapiens
aaagagaagccaaagagcagt

SEQ ID NO: 13688 - RNA, 21 nt, RNAi-sense strand
agagaagccaaagagcaguuu

SEQ ID NO: 13689 - RNA, 21 nt, RNAi-antisense strand
acugcucuuuggcuucucuuu

SEQ ID NO: 13690 - DNA, 21 bp, Homo sapiens
aagagaagccaaagagcagtt

SEQ ID NO: 13691 - RNA, 21 nt, RNAi-sense strand
gagaagccaaagagcaguuuu

SEQ ID NO: 13692 - RNA, 21 nt, RNAi-antisense strand
aacugcucuuuggcuucucuu

SEQ ID NO: 13693 - DNA, 21 bp, Homo sapiens
aaagtattgtgaagacaggct

SEQ ID NO: 13694 - RNA, 21 nt, RNAi-sense strand
aguauugugaagacaggcuuu

SEQ ID NO: 13695 - RNA, 21 nt, RNAi-antisense strand
agccugucuucacaauacuuu

SEQ ID NO: 13696 - DNA, 21 bp, Homo sapiens
aagtattgtgaagacaggctt

SEQ ID NO: 13697 - RNA, 21 nt, RNAi-sense strand
guauugugaagacaggcuuuu

SEQ ID NO: 13698 - RNA, 21 nt, RNAi-antisense strand
aagccugucuucacaauacuu

SEQ ID NO: 13699 - DNA, 21 bp, Homo sapiens
aagacaggcttcttggagtag

SEQ ID NO: 13700 - RNA, 21 nt, RNAi-sense strand
gacaggcuucuuggaguaguu

SEQ ID NO: 13701 - RNA, 21 nt, RNAi-antisense strand
cuacuccaagaagccugucuu

SEQ ID NO: 13702 - DNA, 21 bp, Homo sapiens
aattcagtagacactctaggc

SEQ ID NO: 13703 - RNA, 21 nt, RNAi-sense strand
uucaguagacacucuaggcuu

SEQ ID NO: 13704 - RNA, 21 nt, RNAi-antisense strand
gccuagagugucuacugaauu

SEQ ID NO: 13705 - DNA, 21 bp, Homo sapiens
aagtatcataccatatgcgtg

SEQ ID NO: 13706 - RNA, 21 nt, RNAi-sense strand
guaucauaccauaugcguguu

SEQ ID NO: 13707 - RNA, 21 nt, RNAi-antisense strand
cacgcauaugguaugauacuu

SEQ ID NO: 13708 - DNA, 21 bp, Homo sapiens
aaagtggatgtggttgcctca

SEQ ID NO: 13709 - RNA, 21 nt, RNAi-sense strand
aguggaugugguugccucauu

SEQ ID NO: 13710 - RNA, 21 nt, RNAi-antisense strand
ugaggcaaccacauccacuuu

SEQ ID NO: 13711 - DNA, 21 bp, Homo sapiens
aagtggatgtggttgcctcaa

SEQ ID NO: 13712 - RNA, 21 nt, RNAi-sense strand
guggaugugguugccucaauu

SEQ ID NO: 13713 - RNA, 21 nt, RNAi-antisense strand
uugaggcaaccacauccacuu

SEQ ID NO: 13714 - DNA, 21 bp, Homo sapiens
aatggtcgtggcaggtctgag

SEQ ID NO: 13715 - RNA, 21 nt, RNAi-sense strand
uggucguggcaggucugaguu

SEQ ID NO: 13716 - RNA, 21 nt, RNAi-antisense strand
cucagaccugccacgaccauu

SEQ ID NO: 13717 - DNA, 21 bp, Homo sapiens
aatgctgagtaacaggccacc

SEQ ID NO: 13718 - RNA, 21 nt, RNAi-sense strand
ugcugaguaacaggccaccuu

SEQ ID NO: 13719 - RNA, 21 nt, RNAi-antisense strand
gguggccuguuacucagcauu

SEQ ID NO: 13720 - DNA, 21 bp, Homo sapiens
aacaggccaccaagcggctac

SEQ ID NO: 13721 - RNA, 21 nt, RNAi-sense strand
caggccaccaagcggcuacuu

SEQ ID NO: 13722 - RNA, 21 nt, RNAi-antisense strand
guagccgcuugguggccuguu

SEQ ID NO: 13723 - DNA, 21 bp, Homo sapiens
aagcggctactgcgttatatc

SEQ ID NO: 13724 - RNA, 21 nt, RNAi-sense strand
gcggcuacugcguuauaucuu

SEQ ID NO: 13725 - RNA, 21 nt, RNAi-antisense strand
gauauaacgcaguagccgcuu

SEQ ID NO: 13726 - DNA, 21 bp, Homo sapiens
aactggccgcagtctcttctg

SEQ ID NO: 13727 - RNA, 21 nt, RNAi-sense strand
cuggccgcagucucuucuguu

SEQ ID NO: 13728 - RNA, 21 nt, RNAi-antisense strand
cagaagagacugcggccaguu

SEQ ID NO: 13729 - DNA, 21 bp, Homo sapiens
aatgacattccaaccaccacc

SEQ ID NO: 13730 - RNA, 21 nt, RNAi-sense strand
ugacauuccaaccaccaccuu

SEQ ID NO: 13731 - RNA, 21 nt, RNAi-antisense strand
gguggugguuggaaugucauu

SEQ ID NO: 13732 - DNA, 21 bp, Homo sapiens
aaccaccaccagccagacatt

SEQ ID NO: 13733 - RNA, 21 nt, RNAi-sense strand
ccaccaccagccagacauuuu

SEQ ID NO: 13734 - RNA, 21 nt, RNAi-antisense strand
aaugucuggcugguggugguu

SEQ ID NO: 13735 - DNA, 21 bp, Homo sapiens
aaccttgctgattgtcacaag

SEQ ID NO: 13736 - RNA, 21 nt, RNAi-sense strand
ccuugcugauugucacaaguu

SEQ ID NO: 13737 - RNA, 21 nt, RNAi-antisense strand
cuugugacaaucagcaagguu

SEQ ID NO: 13738 - DNA, 21 bp, Homo sapiens
aaactcctctccacaaatcca

SEQ ID NO: 13739 - RNA, 21 nt, RNAi-sense strand
acuccucuccacaaauccauu

SEQ ID NO: 13740 - RNA, 21 nt, RNAi-antisense strand
uggauuuguggagaggaguuu

SEQ ID NO: 13741 - DNA, 21 bp, Homo sapiens
aactcctctccacaaatccac

SEQ ID NO: 13742 - RNA, 21 nt, RNAi-sense strand
cuccucuccacaaauccacuu

SEQ ID NO: 13743 - RNA, 21 nt, RNAi-antisense strand
guggauuuguggagaggaguu

SEQ ID NO: 13744 - DNA, 21 bp, Homo sapiens
aaatggcacttgaaagagtcc

SEQ ID NO: 13745 - RNA, 21 nt, RNAi-sense strand
auggcacuugaaagaguccuu

SEQ ID NO: 13746 - RNA, 21 nt, RNAi-antisense strand
ggacucuuucaagugccauuu

SEQ ID NO: 13747 - DNA, 21 bp, Homo sapiens
aaagacgcttaaacatttcag

SEQ ID NO: 13748 - RNA, 21 nt, RNAi-sense strand
agacgcuuaaacauuucaguu

SEQ ID NO: 13749 - RNA, 21 nt, RNAi-antisense strand
cugaaauguuuaagcgucuuu

SEQ ID NO: 13750 - DNA, 21 bp, Homo sapiens
aagacgcttaaacatttcagg

SEQ ID NO: 13751 - RNA, 21 nt, RNAi-sense strand
gacgcuuaaacauuucagguu

SEQ ID NO: 13752 - RNA, 21 nt, RNAi-antisense strand
ccugaaauguuuaagcgucuu

SEQ ID NO: 13753 - DNA, 21 bp, Homo sapiens
aattctggtgcttaggaacag

SEQ ID NO: 13754 - RNA, 21 nt, RNAi-sense strand
uucuggugcuuaggaacaguu

SEQ ID NO: 13755 - RNA, 21 nt, RNAi-antisense strand
cuguuccuaagcaccagaauu

SEQ ID NO: 13756 - DNA, 21 bp, Homo sapiens
aaggaagtgaacaggcctgac

SEQ ID NO: 13757 - RNA, 21 nt, RNAi-sense strand
ggaagugaacaggccugacuu

SEQ ID NO: 13758 - RNA, 21 nt, RNAi-antisense strand
gucaggccuguucacuuccuu

SEQ ID NO: 13759 - DNA, 21 bp, Homo sapiens
cactttgacagtggtagcaaa

SEQ ID NO: 13760 - RNA, 21 nt, RNAi-sense strand
cuuugacagugguagcaaauu

SEQ ID NO: 13761 - RNA, 21 nt, RNAi-antisense strand
uuugcuaccacugucaaaguu

SEQ ID NO: 13762 - DNA, 21 bp, Homo sapiens
cagtgacaaagcataaatcat

SEQ ID NO: 13763 - RNA, 21 nt, RNAi-sense strand
gugacaaagcauaaaucauuu

SEQ ID NO: 13764 - RNA, 21 nt, RNAi-antisense strand
augauuuaugcuuugucacuu

SEQ ID NO: 13765 - DNA, 21 bp, Homo sapiens
caaagcataaatcatggacac

SEQ ID NO: 13766 - RNA, 21 nt, RNAi-sense strand
aagcauaaaucauggacacuu

SEQ ID NO: 13767 - RNA, 21 nt, RNAi-antisense strand
guguccaugauuuaugcuuuu

SEQ ID NO: 13768 - DNA, 21 bp, Homo sapiens
cataaatcatggacaccagag

SEQ ID NO: 13769 - RNA, 21 nt, RNAi-sense strand
uaaaucauggacaccagaguu

SEQ ID NO: 13770 - RNA, 21 nt, RNAi-antisense strand
cucugguguccaugauuuauu

SEQ ID NO: 13771 - DNA, 21 bp, Homo sapiens
catggacaccagagaataagg

SEQ ID NO: 13772 - RNA, 21 nt, RNAi-sense strand
uggacaccagagaauaagguu

SEQ ID NO: 13773 - RNA, 21 nt, RNAi-antisense strand
ccuuauucucugguguccauu

SEQ ID NO: 13774 - DNA, 21 bp, Homo sapiens
caccagagaataaggtggacc

SEQ ID NO: 13775 - RNA, 21 nt, RNAi-sense strand
ccagagaauaagguggaccuu

SEQ ID NO: 13776 - RNA, 21 nt, RNAi-antisense strand
gguccaccuuauucucugguu

SEQ ID NO: 13777 - DNA, 21 bp, Homo sapiens
cagagaataaggtggacctca

SEQ ID NO: 13778 - RNA, 21 nt, RNAi-sense strand
gagaauaagguggaccucauu

SEQ ID NO: 13779 - RNA, 21 nt, RNAi-antisense strand
ugagguccaccuuauucucuu

SEQ ID NO: 13780 - DNA, 21 bp, Homo sapiens
catgagttgtgtgccatggaa

SEQ ID NO: 13781 - RNA, 21 nt, RNAi-sense strand
ugaguugugugccauggaauu

SEQ ID NO: 13782 - RNA, 21 nt, RNAi-antisense strand
uuccauggcacacaacucauu

SEQ ID NO: 13783 - DNA, 21 bp, Homo sapiens
catggaaaggagacaaggcca

SEQ ID NO: 13784 - RNA, 21 nt, RNAi-sense strand
uggaaaggagacaaggccauu

SEQ ID NO: 13785 - RNA, 21 nt, RNAi-antisense strand
uggccuugucuccuuuccauu

SEQ ID NO: 13786 - DNA, 21 bp, Homo sapiens
caaggccaaatctgaatcatt

SEQ ID NO: 13787 - RNA, 21 nt, RNAi-sense strand
aggccaaaucugaaucauuuu

SEQ ID NO: 13788 - RNA, 21 nt, RNAi-antisense strand
aaugauucagauuuggccuuu

SEQ ID NO: 13789 - DNA, 21 bp, Homo sapiens
caaatctgaatcattggagct

SEQ ID NO: 13790 - RNA, 21 nt, RNAi-sense strand
aaucugaaucauuggagcuuu

SEQ ID NO: 13791 - RNA, 21 nt, RNAi-antisense strand
agcuccaaugauucagauuuu

SEQ ID NO: 13792 - DNA, 21 bp, Homo sapiens
cacaaatctaccatgagaaac

SEQ ID NO: 13793 - RNA, 21 nt, RNAi-sense strand
caaaucuaccaugagaaacuu

SEQ ID NO: 13794 - RNA, 21 nt, RNAi-antisense strand
guuucucaugguagauuuguu

SEQ ID NO: 13795 - DNA, 21 bp, Homo sapiens
caaatctaccatgagaaacag

SEQ ID NO: 13796 - RNA, 21 nt, RNAi-sense strand
aaucuaccaugagaaacaguu

SEQ ID NO: 13797 - RNA, 21 nt, RNAi-antisense strand
cuguuucucaugguagauuuu

SEQ ID NO: 13798 - DNA, 21 bp, Homo sapiens
caataacgtcttccaggacag

SEQ ID NO: 13799 - RNA, 21 nt, RNAi-sense strand
auaacgucuuccaggacaguu

SEQ ID NO: 13800 - RNA, 21 nt, RNAi-antisense strand
cuguccuggaagacguuauuu

SEQ ID NO: 13801 - DNA, 21 bp, Homo sapiens
caggacagcaatgccttcacc

SEQ ID NO: 13802 - RNA, 21 nt, RNAi-sense strand
ggacagcaaugccuucaccuu

SEQ ID NO: 13803 - RNA, 21 nt, RNAi-antisense strand
ggugaaggcauugcuguccuu

SEQ ID NO: 13804 - DNA, 21 bp, Homo sapiens
cagaggttgtctccaaacacc

SEQ ID NO: 13805 - RNA, 21 nt, RNAi-sense strand
gagguugucuccaaacaccuu

SEQ ID NO: 13806 - RNA, 21 nt, RNAi-antisense strand
gguguuuggagacaaccucuu

SEQ ID NO: 13807 - DNA, 21 bp, Homo sapiens
caaacaccatggtgacacctc

SEQ ID NO: 13808 - RNA, 21 nt, RNAi-sense strand
aacaccauggugacaccucuu

SEQ ID NO: 13809 - RNA, 21 nt, RNAi-antisense strand
gaggugucaccaugguguuuu

SEQ ID NO: 13810 - DNA, 21 bp, Homo sapiens
caccatggtgacacctcacaa

SEQ ID NO: 13811 - RNA, 21 nt, RNAi-sense strand
ccauggugacaccucacaauu

SEQ ID NO: 13812 - RNA, 21 nt, RNAi-antisense strand
uugugaggugucaccaugguu

SEQ ID NO: 13813 - DNA, 21 bp, Homo sapiens
catggtgacacctcacaagaa

SEQ ID NO: 13814 - RNA, 21 nt, RNAi-sense strand
uggugacaccucacaagaauu

SEQ ID NO: 13815 - RNA, 21 nt, RNAi-antisense strand
uucuugugaggugucaccauu

SEQ ID NO: 13816 - DNA, 21 bp, Homo sapiens
cacctcacaagaagagcatgc

SEQ ID NO: 13817 - RNA, 21 nt, RNAi-sense strand
ccucacaagaagagcaugcuu

SEQ ID NO: 13818 - RNA, 21 nt, RNAi-antisense strand
gcaugcucuucuugugagguu

SEQ ID NO: 13819 - DNA, 21 bp, Homo sapiens
caactacgatgtgaatgtcat

SEQ ID NO: 13820 - RNA, 21 nt, RNAi-sense strand
acuacgaugugaaugucauuu

SEQ ID NO: 13821 - RNA, 21 nt, RNAi-antisense strand
augacauucacaucguaguuu

SEQ ID NO: 13822 - DNA, 21 bp, Homo sapiens
cattatggcagcacttcagac

SEQ ID NO: 13823 - RNA, 21 nt, RNAi-sense strand
uuauggcagcacuucagacuu

SEQ ID NO: 13824 - RNA, 21 nt, RNAi-antisense strand
gucugaagugcugccauaauu

SEQ ID NO: 13825 - DNA, 21 bp, Homo sapiens
cagcacttcagaccaaaggct

SEQ ID NO: 13826 - RNA, 21 nt, RNAi-sense strand
gcacuucagaccaaaggcuuu

SEQ ID NO: 13827 - RNA, 21 nt, RNAi-antisense strand
agccuuuggucugaagugcuu

SEQ ID NO: 13828 - DNA, 21 bp, Homo sapiens
cacttcagaccaaaggctatg

SEQ ID NO: 13829 - RNA, 21 nt, RNAi-sense strand
cuucagaccaaaggcuauguu

SEQ ID NO: 13830 - RNA, 21 nt, RNAi-antisense strand
cauagccuuuggucugaaguu

SEQ ID NO: 13831 - DNA, 21 bp, Homo sapiens
cagaccaaaggctatgaagct

SEQ ID NO: 13832 - RNA, 21 nt, RNAi-sense strand
gaccaaaggcuaugaagcuuu

SEQ ID NO: 13833 - RNA, 21 nt, RNAi-antisense strand
agcuucauagccuuuggucuu

SEQ ID NO: 13834 - DNA, 21 bp, Homo sapiens
caaaggctatgaagctgtttg

SEQ ID NO: 13835 - RNA, 21 nt, RNAi-sense strand
aaggcuaugaagcuguuuguu

SEQ ID NO: 13836 - RNA, 21 nt, RNAi-antisense strand
caaacagcuucauagccuuuu

SEQ ID NO: 13837 - DNA, 21 bp, Homo sapiens
cagcactggatctgtgttcga

SEQ ID NO: 13838 - RNA, 21 nt, RNAi-sense strand
gcacuggaucuguguucgauu

SEQ ID NO: 13839 - RNA, 21 nt, RNAi-antisense strand
ucgaacacagauccagugcuu

SEQ ID NO: 13840 - DNA, 21 bp, Homo sapiens
cactggatctgtgttcgagag

SEQ ID NO: 13841 - RNA, 21 nt, RNAi-sense strand
cuggaucuguguucgagaguu

SEQ ID NO: 13842 - RNA, 21 nt, RNAi-antisense strand
cucucgaacacagauccaguu

SEQ ID NO: 13843 - DNA, 21 bp, Homo sapiens
caacctcgactccaaactcaa

SEQ ID NO: 13844 - RNA, 21 nt, RNAi-sense strand
accucgacuccaaacucaauu

SEQ ID NO: 13845 - RNA, 21 nt, RNAi-antisense strand
uugaguuuggagucgagguuu

SEQ ID NO: 13846 - DNA, 21 bp, Homo sapiens
catcatttgcgaggaaagaac

SEQ ID NO: 13847 - RNA, 21 nt, RNAi-sense strand
ucauuugcgaggaaagaacuu

SEQ ID NO: 13848 - RNA, 21 nt, RNAi-antisense strand
guucuuuccucgcaaaugauu

SEQ ID NO: 13849 - DNA, 21 bp, Homo sapiens
catttgcgaggaaagaactgt

SEQ ID NO: 13850 - RNA, 21 nt, RNAi-sense strand
uuugcgaggaaagaacuguuu

SEQ ID NO: 13851 - RNA, 21 nt, RNAi-antisense strand
acaguucuuuccucgcaaauu

SEQ ID NO: 13852 - DNA, 21 bp, Homo sapiens
cagaagaggtagaggctcatc

SEQ ID NO: 13853 - RNA, 21 nt, RNAi-sense strand
gaagagguagaggcucaucuu

SEQ ID NO: 13854 - RNA, 21 nt, RNAi-antisense strand
gaugagccucuaccucuucuu

SEQ ID NO: 13855 - DNA, 21 bp, Homo sapiens
catcagagttggaggaccgat

SEQ ID NO: 13856 - RNA, 21 nt, RNAi-sense strand
ucagaguuggaggaccgauuu

SEQ ID NO: 13857 - RNA, 21 nt, RNAi-antisense strand
aucgguccuccaacucugauu

SEQ ID NO: 13858 - DNA, 21 bp, Homo sapiens
cagagttggaggaccgatgtg

SEQ ID NO: 13859 - RNA, 21 nt, RNAi-sense strand
gaguuggaggaccgauguguu

SEQ ID NO: 13860 - RNA, 21 nt, RNAi-antisense strand
cacaucgguccuccaacucuu

SEQ ID NO: 13861 - DNA, 21 bp, Homo sapiens
cagtcctctgtgacgtgctgt

SEQ ID NO: 13862 - RNA, 21 nt, RNAi-sense strand
guccucugugacgugcuguuu

SEQ ID NO: 13863 - RNA, 21 nt, RNAi-antisense strand
acagcacgucacagaggacuu

SEQ ID NO: 13864 - DNA, 21 bp, Homo sapiens
cagatctgacagtgcaatagg

SEQ ID NO: 13865 - RNA, 21 nt, RNAi-sense strand
gaucugacagugcaauagguu

SEQ ID NO: 13866 - RNA, 21 nt, RNAi-antisense strand
ccuauugcacugucagaucuu

SEQ ID NO: 13867 - DNA, 21 bp, Homo sapiens
cagtgcaataggacagacgtg

SEQ ID NO: 13868 - RNA, 21 nt, RNAi-sense strand
gugcaauaggacagacguguu

SEQ ID NO: 13869 - RNA, 21 nt, RNAi-antisense strand
cacgucuguccuauugcacuu

SEQ ID NO: 13870 - DNA, 21 bp, Homo sapiens
caataggacagacgtgtggac

SEQ ID NO: 13871 - RNA, 21 nt, RNAi-sense strand
auaggacagacguguggacuu

SEQ ID NO: 13872 - RNA, 21 nt, RNAi-antisense strand
guccacacgucuguccuauuu

SEQ ID NO: 13873 - DNA, 21 bp, Homo sapiens
cagacgtgtggactgttataa

SEQ ID NO: 13874 - RNA, 21 nt, RNAi-sense strand
gacguguggacuguuauaauu

SEQ ID NO: 13875 - RNA, 21 nt, RNAi-antisense strand
uuauaacaguccacacgucuu

SEQ ID NO: 13876 - DNA, 21 bp, Homo sapiens
caaggaaggtaggagttctgt

SEQ ID NO: 13877 - RNA, 21 nt, RNAi-sense strand
aggaagguaggaguucuguuu

SEQ ID NO: 13878 - RNA, 21 nt, RNAi-antisense strand
acagaacuccuaccuuccuuu

SEQ ID NO: 13879 - DNA, 21 bp, Homo sapiens
cacttaaggccagtggtcaca

SEQ ID NO: 13880 - RNA, 21 nt, RNAi-sense strand
cuuaaggccaguggucacauu

SEQ ID NO: 13881 - RNA, 21 nt, RNAi-antisense strand
ugugaccacuggccuuaaguu

SEQ ID NO: 13882 - DNA, 21 bp, Homo sapiens
cacaggttctgctgagttgtc

SEQ ID NO: 13883 - RNA, 21 nt, RNAi-sense strand
cagguucugcugaguugucuu

SEQ ID NO: 13884 - RNA, 21 nt, RNAi-antisense strand
gacaacucagcagaaccuguu

SEQ ID NO: 13885 - DNA, 21 bp, Homo sapiens
caggttctgctgagttgtcac

SEQ ID NO: 13886 - RNA, 21 nt, RNAi-sense strand
gguucugcugaguugucacuu

SEQ ID NO: 13887 - RNA, 21 nt, RNAi-antisense strand
gugacaacucagcagaaccuu

SEQ ID NO: 13888 - DNA, 21 bp, Homo sapiens
cactgctgctccagactcacc

SEQ ID NO: 13889 - RNA, 21 nt, RNAi-sense strand
cugcugcuccagacucaccuu

SEQ ID NO: 13890 - RNA, 21 nt, RNAi-antisense strand
ggugagucuggagcagcaguu

SEQ ID NO: 13891 - DNA, 21 bp, Homo sapiens
cagactcacctagagatgctg

SEQ ID NO: 13892 - RNA, 21 nt, RNAi-sense strand
gacucaccuagagaugcuguu

SEQ ID NO: 13893 - RNA, 21 nt, RNAi-antisense strand
cagcaucucuaggugagucuu

SEQ ID NO: 13894 - DNA, 21 bp, Homo sapiens
cacctagagatgctgcctcca

SEQ ID NO: 13895 - RNA, 21 nt, RNAi-sense strand
ccuagagaugcugccuccauu

SEQ ID NO: 13896 - RNA, 21 nt, RNAi-antisense strand
uggaggcagcaucucuagguu

SEQ ID NO: 13897 - DNA, 21 bp, Homo sapiens
catgtgactggtttgaaggac

SEQ ID NO: 13898 - RNA, 21 nt, RNAi-sense strand
ugugacugguuugaaggacuu

SEQ ID NO: 13899 - RNA, 21 nt, RNAi-antisense strand
guccuucaaaccagucacauu

SEQ ID NO: 13900 - DNA, 21 bp, Homo sapiens
cagagcataaaggtctctcag

SEQ ID NO: 13901 - RNA, 21 nt, RNAi-sense strand
gagcauaaaggucucucaguu

SEQ ID NO: 13902 - RNA, 21 nt, RNAi-antisense strand
cugagagaccuuuaugcucuu

SEQ ID NO: 13903 - DNA, 21 bp, Homo sapiens
cataaaggtctctcaggaaac

SEQ ID NO: 13904 - RNA, 21 nt, RNAi-sense strand
uaaaggucucucaggaaacuu

SEQ ID NO: 13905 - RNA, 21 nt, RNAi-antisense strand
guuuccugagagaccuuuauu

SEQ ID NO: 13906 - DNA, 21 bp, Homo sapiens
cagcggtacagcatgctgtct

SEQ ID NO: 13907 - RNA, 21 nt, RNAi-sense strand
gcgguacagcaugcugucuuu

SEQ ID NO: 13908 - RNA, 21 nt, RNAi-antisense strand
agacagcaugcuguaccgcuu

SEQ ID NO: 13909 - DNA, 21 bp, Homo sapiens
caggctggagtgcaatggcac

SEQ ID NO: 13910 - RNA, 21 nt, RNAi-sense strand
ggcuggagugcaauggcacuu

SEQ ID NO: 13911 - RNA, 21 nt, RNAi-antisense strand
gugccauugcacuccagccuu

SEQ ID NO: 13912 - DNA, 21 bp, Homo sapiens
caatggcaccatctcggctca

SEQ ID NO: 13913 - RNA, 21 nt, RNAi-sense strand
auggcaccaucucggcucauu

SEQ ID NO: 13914 - RNA, 21 nt, RNAi-antisense strand
ugagccgagauggugccauuu

SEQ ID NO: 13915 - DNA, 21 bp, Homo sapiens
caccatctcggctcactgcaa

SEQ ID NO: 13916 - RNA, 21 nt, RNAi-sense strand
ccaucucggcucacugcaauu

SEQ ID NO: 13917 - RNA, 21 nt, RNAi-antisense strand
uugcagugagccgagaugguu

SEQ ID NO: 13918 - DNA, 21 bp, Homo sapiens
catctcggctcactgcaacct

SEQ ID NO: 13919 - RNA, 21 nt, RNAi-sense strand
ucucggcucacugcaaccuuu

SEQ ID NO: 13920 - RNA, 21 nt, RNAi-antisense strand
agguugcagugagccgagauu

SEQ ID NO: 13921 - DNA, 21 bp, Homo sapiens
cactgcaacctccacctcctg

SEQ ID NO: 13922 - RNA, 21 nt, RNAi-sense strand
cugcaaccuccaccuccuguu

SEQ ID NO: 13923 - RNA, 21 nt, RNAi-antisense strand
caggagguggagguugcaguu

SEQ ID NO: 13924 - DNA, 21 bp, Homo sapiens
caacctccacctcctggttca

SEQ ID NO: 13925 - RNA, 21 nt, RNAi-sense strand
accuccaccuccugguucauu

SEQ ID NO: 13926 - RNA, 21 nt, RNAi-antisense strand
ugaaccaggagguggagguuu

SEQ ID NO: 13927 - DNA, 21 bp, Homo sapiens
cacctcctggttcaagcgatt

SEQ ID NO: 13928 - RNA, 21 nt, RNAi-sense strand
ccuccugguucaagcgauuuu

SEQ ID NO: 13929 - RNA, 21 nt, RNAi-antisense strand
aaucgcuugaaccaggagguu

SEQ ID NO: 13930 - DNA, 21 bp, Homo sapiens
caagcgattctcaggcctcag

SEQ ID NO: 13931 - RNA, 21 nt, RNAi-sense strand
agcgauucucaggccucaguu

SEQ ID NO: 13932 - RNA, 21 nt, RNAi-antisense strand
cugaggccugagaaucgcuuu

SEQ ID NO: 13933 - DNA, 21 bp, Homo sapiens
catgttggtcaggctggtctc

SEQ ID NO: 13934 - RNA, 21 nt, RNAi-sense strand
uguuggucaggcuggucucuu

SEQ ID NO: 13935 - RNA, 21 nt, RNAi-antisense strand
gagaccagccugaccaacauu

SEQ ID NO: 13936 - DNA, 21 bp, Homo sapiens
caggatgtggctaaagccaac

SEQ ID NO: 13937 - RNA, 21 nt, RNAi-sense strand
ggauguggcuaaagccaacuu

SEQ ID NO: 13938 - RNA, 21 nt, RNAi-antisense strand
guuggcuuuagccacauccuu

SEQ ID NO: 13939 - DNA, 21 bp, Homo sapiens
catttcgcagcattgatttag

SEQ ID NO: 13940 - RNA, 21 nt, RNAi-sense strand
uuucgcagcauugauuuaguu

SEQ ID NO: 13941 - RNA, 21 nt, RNAi-antisense strand
cuaaaucaaugcugcgaaauu

SEQ ID NO: 13942 - DNA, 21 bp, Homo sapiens
cagcattgatttaggaggctc

SEQ ID NO: 13943 - RNA, 21 nt, RNAi-sense strand
gcauugauuuaggaggcucuu

SEQ ID NO: 13944 - RNA, 21 nt, RNAi-antisense strand
gagccuccuaaaucaaugcuu

SEQ ID NO: 13945 - DNA, 21 bp, Homo sapiens
cattgatttaggaggctctgg

SEQ ID NO: 13946 - RNA, 21 nt, RNAi-sense strand
uugauuuaggaggcucugguu

SEQ ID NO: 13947 - RNA, 21 nt, RNAi-antisense strand
ccagagccuccuaaaucaauu

SEQ ID NO: 13948 - DNA, 21 bp, Homo sapiens
cagttcactcactctggcaaa

SEQ ID NO: 13949 - RNA, 21 nt, RNAi-sense strand
guucacucacucuggcaaauu

SEQ ID NO: 13950 - RNA, 21 nt, RNAi-antisense strand
uuugccagagugagugaacuu

SEQ ID NO: 13951 - DNA, 21 bp, Homo sapiens
catcaaattccactaatttgg

SEQ ID NO: 13952 - RNA, 21 nt, RNAi-sense strand
ucaaauuccacuaauuugguu

SEQ ID NO: 13953 - RNA, 21 nt, RNAi-antisense strand
ccaaauuaguggaauuugauu

SEQ ID NO: 13954 - DNA, 21 bp, Homo sapiens
cagccacaattcagtagacac

SEQ ID NO: 13955 - RNA, 21 nt, RNAi-sense strand
gccacaauucaguagacacuu

SEQ ID NO: 13956 - RNA, 21 nt, RNAi-antisense strand
gugucuacugaauuguggcuu

SEQ ID NO: 13957 - DNA, 21 bp, Homo sapiens
cacaattcagtagacactcta

SEQ ID NO: 13958 - RNA, 21 nt, RNAi-sense strand
caauucaguagacacucuauu

SEQ ID NO: 13959 - RNA, 21 nt, RNAi-antisense strand
uagagugucuacugaauuguu

SEQ ID NO: 13960 - DNA, 21 bp, Homo sapiens
caattcagtagacactctagg

SEQ ID NO: 13961 - RNA, 21 nt, RNAi-sense strand
auucaguagacacucuagguu

SEQ ID NO: 13962 - RNA, 21 nt, RNAi-antisense strand
ccuagagugucuacugaauuu

SEQ ID NO: 13963 - DNA, 21 bp, Homo sapiens
cagtagacactctaggctcgg

SEQ ID NO: 13964 - RNA, 21 nt, RNAi-sense strand
guagacacucuaggcucgguu

SEQ ID NO: 13965 - RNA, 21 nt, RNAi-antisense strand
ccgagccuagagugucuacuu

SEQ ID NO: 13966 - DNA, 21 bp, Homo sapiens
cactgtagttgccaagctcag

SEQ ID NO: 13967 - RNA, 21 nt, RNAi-sense strand
cuguaguugccaagcucaguu

SEQ ID NO: 13968 - RNA, 21 nt, RNAi-antisense strand
cugagcuuggcaacuacaguu

SEQ ID NO: 13969 - DNA, 21 bp, Homo sapiens
catcttcatgtcgtttcctct

SEQ ID NO: 13970 - RNA, 21 nt, RNAi-sense strand
ucuucaugucguuuccucuuu

SEQ ID NO: 13971 - RNA, 21 nt, RNAi-antisense strand
agaggaaacgacaugaagauu

SEQ ID NO: 13972 - DNA, 21 bp, Homo sapiens
catgtcgtttcctctctgtat

SEQ ID NO: 13973 - RNA, 21 nt, RNAi-sense strand
ugucguuuccucucuguauuu

SEQ ID NO: 13974 - RNA, 21 nt, RNAi-antisense strand
auacagagaggaaacgacauu

SEQ ID NO: 13975 - DNA, 21 bp, Homo sapiens
cagatagttgtaggccacttt

SEQ ID NO: 13976 - RNA, 21 nt, RNAi-sense strand
gauaguuguaggccacuuuuu

SEQ ID NO: 13977 - RNA, 21 nt, RNAi-antisense strand
aaaguggccuacaacuaucuu

SEQ ID NO: 13978 - DNA, 21 bp, Homo sapiens
cataccatatgcgtgtctcca

SEQ ID NO: 13979 - RNA, 21 nt, RNAi-sense strand
uaccauaugcgugucuccauu

SEQ ID NO: 13980 - RNA, 21 nt, RNAi-antisense strand
uggagacacgcauaugguauu

SEQ ID NO: 13981 - DNA, 21 bp, Homo sapiens
catatgcgtgtctccaaagtg

SEQ ID NO: 13982 - RNA, 21 nt, RNAi-sense strand
uaugcgugucuccaaaguguu

SEQ ID NO: 13983 - RNA, 21 nt, RNAi-antisense strand
cacuuuggagacacgcauauu

SEQ ID NO: 13984 - DNA, 21 bp, Homo sapiens
caaagtggatgtggttgcctc

SEQ ID NO: 13985 - RNA, 21 nt, RNAi-sense strand
aaguggaugugguugccucuu

SEQ ID NO: 13986 - RNA, 21 nt, RNAi-antisense strand
gaggcaaccacauccacuuuu

SEQ ID NO: 13987 - DNA, 21 bp, Homo sapiens
cagatcaatggtcgtggcagg

SEQ ID NO: 13988 - RNA, 21 nt, RNAi-sense strand
gaucaauggucguggcagguu

SEQ ID NO: 13989 - RNA, 21 nt, RNAi-antisense strand
ccugccacgaccauugaucuu

SEQ ID NO: 13990 - DNA, 21 bp, Homo sapiens
caatggtcgtggcaggtctga

SEQ ID NO: 13991 - RNA, 21 nt, RNAi-sense strand
auggucguggcaggucugauu

SEQ ID NO: 13992 - RNA, 21 nt, RNAi-antisense strand
ucagaccugccacgaccauuu

SEQ ID NO: 13993 - DNA, 21 bp, Homo sapiens
cactggccagacttctctcca

SEQ ID NO: 13994 - RNA, 21 nt, RNAi-sense strand
cuggccagacuucucuccauu

SEQ ID NO: 13995 - RNA, 21 nt, RNAi-antisense strand
uggagagaagucuggccaguu

SEQ ID NO: 13996 - DNA, 21 bp, Homo sapiens
cagacttctctccagcagcaa

SEQ ID NO: 13997 - RNA, 21 nt, RNAi-sense strand
gacuucucuccagcagcaauu

SEQ ID NO: 13998 - RNA, 21 nt, RNAi-antisense strand
uugcugcuggagagaagucuu

SEQ ID NO: 13999 - DNA, 21 bp, Homo sapiens
catgttgatcctgagcaagct

SEQ ID NO: 14000 - RNA, 21 nt, RNAi-sense strand
uguugauccugagcaagcuuu

SEQ ID NO: 14001 - RNA, 21 nt, RNAi-antisense strand
agcuugcucaggaucaacauu

SEQ ID NO: 14002 - DNA, 21 bp, Homo sapiens
cacatgtatcttcaatccaac

SEQ ID NO: 14003 - RNA, 21 nt, RNAi-sense strand
cauguaucuucaauccaacuu

SEQ ID NO: 14004 - RNA, 21 nt, RNAi-antisense strand
guuggauugaagauacauguu

SEQ ID NO: 14005 - DNA, 21 bp, Homo sapiens
catgtatcttcaatccaacaa

SEQ ID NO: 14006 - RNA, 21 nt, RNAi-sense strand
uguaucuucaauccaacaauu

SEQ ID NO: 14007 - RNA, 21 nt, RNAi-antisense strand
uuguuggauugaagauacauu

SEQ ID NO: 14008 - DNA, 21 bp, Homo sapiens
caccaagcggctactgcgtta

SEQ ID NO: 14009 - RNA, 21 nt, RNAi-sense strand
ccaagcggcuacugcguuauu

SEQ ID NO: 14010 - RNA, 21 nt, RNAi-antisense strand
uaacgcaguagccgcuugguu

SEQ ID NO: 14011 - DNA, 21 bp, Homo sapiens
caagcggctactgcgttatat

SEQ ID NO: 14012 - RNA, 21 nt, RNAi-sense strand
agcggcuacugcguuauauuu

SEQ ID NO: 14013 - RNA, 21 nt, RNAi-antisense strand
auauaacgcaguagccgcuuu

SEQ ID NO: 14014 - DNA, 21 bp, Homo sapiens
cagcaactggccgcagtctct

SEQ ID NO: 14015 - RNA, 21 nt, RNAi-sense strand
gcaacuggccgcagucucuuu

SEQ ID NO: 14016 - RNA, 21 nt, RNAi-antisense strand
agagacugcggccaguugcuu

SEQ ID NO: 14017 - DNA, 21 bp, Homo sapiens
caactggccgcagtctcttct

SEQ ID NO: 14018 - RNA, 21 nt, RNAi-sense strand
acuggccgcagucucuucuuu

SEQ ID NO: 14019 - RNA, 21 nt, RNAi-antisense strand
agaagagacugcggccaguuu

SEQ ID NO: 14020 - DNA, 21 bp, Homo sapiens
caccagacctgcttggcacca

SEQ ID NO: 14021 - RNA, 21 nt, RNAi-sense strand
ccagaccugcuuggcaccauu

SEQ ID NO: 14022 - RNA, 21 nt, RNAi-antisense strand
uggugccaagcaggucugguu

SEQ ID NO: 14023 - DNA, 21 bp, Homo sapiens
cagacctgcttggcaccacag

SEQ ID NO: 14024 - RNA, 21 nt, RNAi-sense strand
gaccugcuuggcaccacaguu

SEQ ID NO: 14025 - RNA, 21 nt, RNAi-antisense strand
cuguggugccaagcaggucuu

SEQ ID NO: 14026 - DNA, 21 bp, Homo sapiens
cacaatgacattccaaccacc

SEQ ID NO: 14027 - RNA, 21 nt, RNAi-sense strand
caaugacauuccaaccaccuu

SEQ ID NO: 14028 - RNA, 21 nt, RNAi-antisense strand
ggugguuggaaugucauuguu

SEQ ID NO: 14029 - DNA, 21 bp, Homo sapiens
caatgacattccaaccaccac

SEQ ID NO: 14030 - RNA, 21 nt, RNAi-sense strand
augacauuccaaccaccacuu

SEQ ID NO: 14031 - RNA, 21 nt, RNAi-antisense strand
guggugguuggaaugucauuu

SEQ ID NO: 14032 - DNA, 21 bp, Homo sapiens
cattccaaccaccaccagcca

SEQ ID NO: 14033 - RNA, 21 nt, RNAi-sense strand
uuccaaccaccaccagccauu

SEQ ID NO: 14034 - RNA, 21 nt, RNAi-antisense strand
uggcugguggugguuggaauu

SEQ ID NO: 14035 - DNA, 21 bp, Homo sapiens
caaccaccaccagccagacat

SEQ ID NO: 14036 - RNA, 21 nt, RNAi-sense strand
accaccaccagccagacauuu

SEQ ID NO: 14037 - RNA, 21 nt, RNAi-antisense strand
augucuggcugguggugguuu

SEQ ID NO: 14038 - DNA, 21 bp, Homo sapiens
caccaccagccagacattaca

SEQ ID NO: 14039 - RNA, 21 nt, RNAi-sense strand
ccaccagccagacauuacauu

SEQ ID NO: 14040 - RNA, 21 nt, RNAi-antisense strand
uguaaugucuggcuggugguu

SEQ ID NO: 14041 - DNA, 21 bp, Homo sapiens
caccagccagacattacagcc

SEQ ID NO: 14042 - RNA, 21 nt, RNAi-sense strand
ccagccagacauuacagccuu

SEQ ID NO: 14043 - RNA, 21 nt, RNAi-antisense strand
ggcuguaaugucuggcugguu

SEQ ID NO: 14044 - DNA, 21 bp, Homo sapiens
cagccagacattacagccaac

SEQ ID NO: 14045 - RNA, 21 nt, RNAi-sense strand
gccagacauuacagccaacuu

SEQ ID NO: 14046 - RNA, 21 nt, RNAi-antisense strand
guuggcuguaaugucuggcuu

SEQ ID NO: 14047 - DNA, 21 bp, Homo sapiens
cagacattacagccaaccttg

SEQ ID NO: 14048 - RNA, 21 nt, RNAi-sense strand
gacauuacagccaaccuuguu

SEQ ID NO: 14049 - RNA, 21 nt, RNAi-antisense strand
caagguuggcuguaaugucuu

SEQ ID NO: 14050 - DNA, 21 bp, Homo sapiens
cattacagccaaccttgctga

SEQ ID NO: 14051 - RNA, 21 nt, RNAi-sense strand
uuacagccaaccuugcugauu

SEQ ID NO: 14052 - RNA, 21 nt, RNAi-antisense strand
ucagcaagguuggcuguaauu

SEQ ID NO: 14053 - DNA, 21 bp, Homo sapiens
cagccaaccttgctgattgtc

SEQ ID NO: 14054 - RNA, 21 nt, RNAi-sense strand
gccaaccuugcugauugucuu

SEQ ID NO: 14055 - RNA, 21 nt, RNAi-antisense strand
gacaaucagcaagguuggcuu

SEQ ID NO: 14056 - DNA, 21 bp, Homo sapiens
caaccttgctgattgtcacaa

SEQ ID NO: 14057 - RNA, 21 nt, RNAi-sense strand
accuugcugauugucacaauu

SEQ ID NO: 14058 - RNA, 21 nt, RNAi-antisense strand
uugugacaaucagcaagguuu

SEQ ID NO: 14059 - DNA, 21 bp, Homo sapiens
cactggcactgtcagatagta

SEQ ID NO: 14060 - RNA, 21 nt, RNAi-sense strand
cuggcacugucagauaguauu

SEQ ID NO: 14061 - RNA, 21 nt, RNAi-antisense strand
uacuaucugacagugccaguu

SEQ ID NO: 14062 - DNA, 21 bp, Homo sapiens
cactgtcagatagtaagccat

SEQ ID NO: 14063 - RNA, 21 nt, RNAi-sense strand
cugucagauaguaagccauuu

SEQ ID NO: 14064 - RNA, 21 nt, RNAi-antisense strand
auggcuuacuaucugacaguu

SEQ ID NO: 14065 - DNA, 21 bp, Homo sapiens
cagatagtaagccatttcttg

SEQ ID NO: 14066 - RNA, 21 nt, RNAi-sense strand
gauaguaagccauuucuuguu

SEQ ID NO: 14067 - RNA, 21 nt, RNAi-antisense strand
caagaaauggcuuacuaucuu

SEQ ID NO: 14068 - DNA, 21 bp, Homo sapiens
caaatggcacttgaaagagtc

SEQ ID NO: 14069 - RNA, 21 nt, RNAi-sense strand
aauggcacuugaaagagucuu

SEQ ID NO: 14070 - RNA, 21 nt, RNAi-antisense strand
gacucuuucaagugccauuuu

SEQ ID NO: 14071 - DNA, 21 bp, Homo sapiens
catgcacttggagtccatgag

SEQ ID NO: 14072 - RNA, 21 nt, RNAi-sense strand
ugcacuuggaguccaugaguu

SEQ ID NO: 14073 - RNA, 21 nt, RNAi-antisense strand
cucauggacuccaagugcauu

SEQ ID NO: 14074 - DNA, 21 bp, Homo sapiens
cacttggagtccatgagccaa

SEQ ID NO: 14075 - RNA, 21 nt, RNAi-sense strand
cuuggaguccaugagccaauu

SEQ ID NO: 14076 - RNA, 21 nt, RNAi-antisense strand
uuggcucauggacuccaaguu

SEQ ID NO: 14077 - DNA, 21 bp, Homo sapiens
caaagacgcttaaacatttca

SEQ ID NO: 14078 - RNA, 21 nt, RNAi-sense strand
aagacgcuuaaacauuucauu

SEQ ID NO: 14079 - RNA, 21 nt, RNAi-antisense strand
ugaaauguuuaagcgucuuuu

SEQ ID NO: 14080 - DNA, 21 bp, Homo sapiens
catatccaattctggtgctta

SEQ ID NO: 14081 - RNA, 21 nt, RNAi-sense strand
uauccaauucuggugcuuauu

SEQ ID NO: 14082 - RNA, 21 nt, RNAi-antisense strand
uaagcaccagaauuggauauu

SEQ ID NO: 14083 - DNA, 21 bp, Homo sapiens
caattctggtgcttaggaaca

SEQ ID NO: 14084 - RNA, 21 nt, RNAi-sense strand
auucuggugcuuaggaacauu

SEQ ID NO: 14085 - RNA, 21 nt, RNAi-antisense strand
uguuccuaagcaccagaauuu

SEQ ID NO: 14086 - DNA, 21 bp, Homo sapiens
cacttcctttaaggaagtgaa

SEQ ID NO: 14087 - RNA, 21 nt, RNAi-sense strand
cuuccuuuaaggaagugaauu

SEQ ID NO: 14088 - RNA, 21 nt, RNAi-antisense strand
uucacuuccuuaaaggaaguu

SEQ ID NO: 14089 - DNA, 21 bp, Homo sapiens
gacaaagcataaatcatggac

SEQ ID NO: 14090 - RNA, 21 nt, RNAi-sense strand
caaagcauaaaucauggacuu

SEQ ID NO: 14091 - RNA, 21 nt, RNAi-antisense strand
guccaugauuuaugcuuuguu

SEQ ID NO: 14092 - DNA, 21 bp, Homo sapiens
gacaccagagaataaggtgga

SEQ ID NO: 14093 - RNA, 21 nt, RNAi-sense strand
caccagagaauaagguggauu

SEQ ID NO: 14094 - RNA, 21 nt, RNAi-antisense strand
uccaccuuauucucugguguu

SEQ ID NO: 14095 - DNA, 21 bp, Homo sapiens
gagaataaggtggacctcagg

SEQ ID NO: 14096 - RNA, 21 nt, RNAi-sense strand
gaauaagguggaccucagguu

SEQ ID NO: 14097 - RNA, 21 nt, RNAi-antisense strand
ccugagguccaccuuauucuu

SEQ ID NO: 14098 - DNA, 21 bp, Homo sapiens
gaataaggtggacctcaggaa

SEQ ID NO: 14099 - RNA, 21 nt, RNAi-sense strand
auaagguggaccucaggaauu

SEQ ID NO: 14100 - RNA, 21 nt, RNAi-antisense strand
uuccugagguccaccuuauuu

SEQ ID NO: 14101 - DNA, 21 bp, Homo sapiens
gactgagaagcttacattctt

SEQ ID NO: 14102 - RNA, 21 nt, RNAi-sense strand
cugagaagcuuacauucuuuu

SEQ ID NO: 14103 - RNA, 21 nt, RNAi-antisense strand
aagaauguaagcuucucaguu

SEQ ID NO: 14104 - DNA, 21 bp, Homo sapiens
gagaagcttacattcttcctc

SEQ ID NO: 14105 - RNA, 21 nt, RNAi-sense strand
gaagcuuacauucuuccucuu

SEQ ID NO: 14106 - RNA, 21 nt, RNAi-antisense strand
gaggaagaauguaagcuucuu

SEQ ID NO: 14107 - DNA, 21 bp, Homo sapiens
gaagcttacattcttcctcta

SEQ ID NO: 14108 - RNA, 21 nt, RNAi-sense strand
agcuuacauucuuccucuauu

SEQ ID NO: 14109 - RNA, 21 nt, RNAi-antisense strand
uagaggaagaauguaagcuuu

SEQ ID NO: 14110 - DNA, 21 bp, Homo sapiens
gagttgtgtgccatggaaagg

SEQ ID NO: 14111 - RNA, 21 nt, RNAi-sense strand
guugugugccauggaaagguu

SEQ ID NO: 14112 - RNA, 21 nt, RNAi-antisense strand
ccuuuccauggcacacaacuu

SEQ ID NO: 14113 - DNA, 21 bp, Homo sapiens
gaaaggagacaaggccaaatc

SEQ ID NO: 14114 - RNA, 21 nt, RNAi-sense strand
aaggagacaaggccaaaucuu

SEQ ID NO: 14115 - RNA, 21 nt, RNAi-antisense strand
gauuuggccuugucuccuuuu

SEQ ID NO: 14116 - DNA, 21 bp, Homo sapiens
gagacaaggccaaatctgaat

SEQ ID NO: 14117 - RNA, 21 nt, RNAi-sense strand
gacaaggccaaaucugaauuu

SEQ ID NO: 14118 - RNA, 21 nt, RNAi-antisense strand
auucagauuuggccuugucuu

SEQ ID NO: 14119 - DNA, 21 bp, Homo sapiens
gacaaggccaaatctgaatca

SEQ ID NO: 14120 - RNA, 21 nt, RNAi-sense strand
caaggccaaaucugaaucauu

SEQ ID NO: 14121 - RNA, 21 nt, RNAi-antisense strand
ugauucagauuuggccuuguu

SEQ ID NO: 14122 - DNA, 21 bp, Homo sapiens
gaggttgtctccaaacaccat

SEQ ID NO: 14123 - RNA, 21 nt, RNAi-sense strand
gguugucuccaaacaccauuu

SEQ ID NO: 14124 - RNA, 21 nt, RNAi-antisense strand
augguguuuggagacaaccuu

SEQ ID NO: 14125 - DNA, 21 bp, Homo sapiens
gacacctcacaagaagagcat

SEQ ID NO: 14126 - RNA, 21 nt, RNAi-sense strand
caccucacaagaagagcauuu

SEQ ID NO: 14127 - RNA, 21 nt, RNAi-antisense strand
augcucuucuugugagguguu

SEQ ID NO: 14128 - DNA, 21 bp, Homo sapiens
gaaatggcaactacgatgtga

SEQ ID NO: 14129 - RNA, 21 nt, RNAi-sense strand
aauggcaacuacgaugugauu

SEQ ID NO: 14130 - RNA, 21 nt, RNAi-antisense strand
ucacaucguaguugccauuuu

SEQ ID NO: 14131 - DNA, 21 bp, Homo sapiens
gatgtgaatgtcattatggca

SEQ ID NO: 14132 - RNA, 21 nt, RNAi-sense strand
ugugaaugucauuauggcauu

SEQ ID NO: 14133 - RNA, 21 nt, RNAi-antisense strand
ugccauaaugacauucacauu

SEQ ID NO: 14134 - DNA, 21 bp, Homo sapiens
gaatgtcattatggcagcact

SEQ ID NO: 14135 - RNA, 21 nt, RNAi-sense strand
augucauuauggcagcacuuu

SEQ ID NO: 14136 - RNA, 21 nt, RNAi-antisense strand
agugcugccauaaugacauuu

SEQ ID NO: 14137 - DNA, 21 bp, Homo sapiens
gaccaaaggctatgaagctgt

SEQ ID NO: 14138 - RNA, 21 nt, RNAi-sense strand
ccaaaggcuaugaagcuguuu

SEQ ID NO: 14139 - RNA, 21 nt, RNAi-antisense strand
acagcuucauagccuuugguu

SEQ ID NO: 14140 - DNA, 21 bp, Homo sapiens
gagtggattggaggcgagagc

SEQ ID NO: 14141 - RNA, 21 nt, RNAi-sense strand
guggauuggaggcgagagcuu

SEQ ID NO: 14142 - RNA, 21 nt, RNAi-antisense strand
gcucucgccuccaauccacuu

SEQ ID NO: 14143 - DNA, 21 bp, Homo sapiens
gattggaggcgagagcgagct

SEQ ID NO: 14144 - RNA, 21 nt, RNAi-sense strand
uuggaggcgagagcgagcuuu

SEQ ID NO: 14145 - RNA, 21 nt, RNAi-antisense strand
agcucgcucucgccuccaauu

SEQ ID NO: 14146 - DNA, 21 bp, Homo sapiens
gagagcgagctcaggaagttt

SEQ ID NO: 14147 - RNA, 21 nt, RNAi-sense strand
gagcgagcucaggaaguuuuu

SEQ ID NO: 14148 - RNA, 21 nt, RNAi-antisense strand
aaacuuccugagcucgcucuu

SEQ ID NO: 14149 - DNA, 21 bp, Homo sapiens
gagcgagctcaggaagtttct

SEQ ID NO: 14150 - RNA, 21 nt, RNAi-sense strand
gcgagcucaggaaguuucuuu

SEQ ID NO: 14151 - RNA, 21 nt, RNAi-antisense strand
agaaacuuccugagcucgcuu

SEQ ID NO: 14152 - DNA, 21 bp, Homo sapiens
gaggaaagaactgtgaactcc

SEQ ID NO: 14153 - RNA, 21 nt, RNAi-sense strand
ggaaagaacugugaacuccuu

SEQ ID NO: 14154 - RNA, 21 nt, RNAi-antisense strand
ggaguucacaguucuuuccuu

SEQ ID NO: 14155 - DNA, 21 bp, Homo sapiens
gaaagaactgtgaactcctgc

SEQ ID NO: 14156 - RNA, 21 nt, RNAi-sense strand
aagaacugugaacuccugcuu

SEQ ID NO: 14157 - RNA, 21 nt, RNAi-antisense strand
gcaggaguucacaguucuuuu

SEQ ID NO: 14158 - DNA, 21 bp, Homo sapiens
gaactgtgaactcctgctggt

SEQ ID NO: 14159 - RNA, 21 nt, RNAi-sense strand
acugugaacuccugcugguuu

SEQ ID NO: 14160 - RNA, 21 nt, RNAi-antisense strand
accagcaggaguucacaguuu

SEQ ID NO: 14161 - DNA, 21 bp, Homo sapiens
gaactcctgctggtggtacca

SEQ ID NO: 14162 - RNA, 21 nt, RNAi-sense strand
acuccugcuggugguaccauu

SEQ ID NO: 14163 - RNA, 21 nt, RNAi-antisense strand
ugguaccaccagcaggaguuu

SEQ ID NO: 14164 - DNA, 21 bp, Homo sapiens
gaagaggtagaggctcatcag

SEQ ID NO: 14165 - RNA, 21 nt, RNAi-sense strand
agagguagaggcucaucaguu

SEQ ID NO: 14166 - RNA, 21 nt, RNAi-antisense strand
cugaugagccucuaccucuuu

SEQ ID NO: 14167 - DNA, 21 bp, Homo sapiens
gaggtagaggctcatcagagt

SEQ ID NO: 14168 - RNA, 21 nt, RNAi-sense strand
gguagaggcucaucagaguuu

SEQ ID NO: 14169 - RNA, 21 nt, RNAi-antisense strand
acucugaugagccucuaccuu

SEQ ID NO: 14170 - DNA, 21 bp, Homo sapiens
gaggctcatcagagttggagg

SEQ ID NO: 14171 - RNA, 21 nt, RNAi-sense strand
ggcucaucagaguuggagguu

SEQ ID NO: 14172 - RNA, 21 nt, RNAi-antisense strand
ccuccaacucugaugagccuu

SEQ ID NO: 14173 - DNA, 21 bp, Homo sapiens
gagttggaggaccgatgtgta

SEQ ID NO: 14174 - RNA, 21 nt, RNAi-sense strand
guuggaggaccgauguguauu

SEQ ID NO: 14175 - RNA, 21 nt, RNAi-antisense strand
uacacaucgguccuccaacuu

SEQ ID NO: 14176 - DNA, 21 bp, Homo sapiens
gaggaccgatgtgtaacagtt

SEQ ID NO: 14177 - RNA, 21 nt, RNAi-sense strand
ggaccgauguguaacaguuuu

SEQ ID NO: 14178 - RNA, 21 nt, RNAi-antisense strand
aacuguuacacaucgguccuu

SEQ ID NO: 14179 - DNA, 21 bp, Homo sapiens
gaccgatgtgtaacagttctg

SEQ ID NO: 14180 - RNA, 21 nt, RNAi-sense strand
ccgauguguaacaguucuguu

SEQ ID NO: 14181 - RNA, 21 nt, RNAi-antisense strand
cagaacuguuacacaucgguu

SEQ ID NO: 14182 - DNA, 21 bp, Homo sapiens
gacgtgctgtggcctctacag

SEQ ID NO: 14183 - RNA, 21 nt, RNAi-sense strand
cgugcuguggccucuacaguu

SEQ ID NO: 14184 - RNA, 21 nt, RNAi-antisense strand
cuguagaggccacagcacguu

SEQ ID NO: 14185 - DNA, 21 bp, Homo sapiens
gatctgacagtgcaataggac

SEQ ID NO: 14186 - RNA, 21 nt, RNAi-sense strand
ucugacagugcaauaggacuu

SEQ ID NO: 14187 - RNA, 21 nt, RNAi-antisense strand
guccuauugcacugucagauu

SEQ ID NO: 14188 - DNA, 21 bp, Homo sapiens
gacagtgcaataggacagacg

SEQ ID NO: 14189 - RNA, 21 nt, RNAi-sense strand
cagugcaauaggacagacguu

SEQ ID NO: 14190 - RNA, 21 nt, RNAi-antisense strand
cgucuguccuauugcacuguu

SEQ ID NO: 14191 - DNA, 21 bp, Homo sapiens
gacagacgtgtggactgttat

SEQ ID NO: 14192 - RNA, 21 nt, RNAi-sense strand
cagacguguggacuguuauuu

SEQ ID NO: 14193 - RNA, 21 nt, RNAi-antisense strand
auaacaguccacacgucuguu

SEQ ID NO: 14194 - DNA, 21 bp, Homo sapiens
gacgtgtggactgttataaga

SEQ ID NO: 14195 - RNA, 21 nt, RNAi-sense strand
cguguggacuguuauaagauu

SEQ ID NO: 14196 - RNA, 21 nt, RNAi-antisense strand
ucuuauaacaguccacacguu

SEQ ID NO: 14197 - DNA, 21 bp, Homo sapiens
gactgttataagaactactca

SEQ ID NO: 14198 - RNA, 21 nt, RNAi-sense strand
cuguuauaagaacuacucauu

SEQ ID NO: 14199 - RNA, 21 nt, RNAi-antisense strand
ugaguaguucuuauaacaguu

SEQ ID NO: 14200 - DNA, 21 bp, Homo sapiens
gaaggtaggagttctgtgcac

SEQ ID NO: 14201 - RNA, 21 nt, RNAi-sense strand
agguaggaguucugugcacuu

SEQ ID NO: 14202 - RNA, 21 nt, RNAi-antisense strand
gugcacagaacuccuaccuuu

SEQ ID NO: 14203 - DNA, 21 bp, Homo sapiens
gagttctgtgcacttaaggcc

SEQ ID NO: 14204 - RNA, 21 nt, RNAi-sense strand
guucugugcacuuaaggccuu

SEQ ID NO: 14205 - RNA, 21 nt, RNAi-antisense strand
ggccuuaagugcacagaacuu

SEQ ID NO: 14206 - DNA, 21 bp, Homo sapiens
gagacagaggagaaagtggag

SEQ ID NO: 14207 - RNA, 21 nt, RNAi-sense strand
gacagaggagaaaguggaguu

SEQ ID NO: 14208 - RNA, 21 nt, RNAi-antisense strand
cuccacuuucuccucugucuu

SEQ ID NO: 14209 - DNA, 21 bp, Homo sapiens
gacagaggagaaagtggagcg

SEQ ID NO: 14210 - RNA, 21 nt, RNAi-sense strand
cagaggagaaaguggagcguu

SEQ ID NO: 14211 - RNA, 21 nt, RNAi-antisense strand
cgcuccacuuucuccucuguu

SEQ ID NO: 14212 - DNA, 21 bp, Homo sapiens
gaggacttgacacaggttctg

SEQ ID NO: 14213 - RNA, 21 nt, RNAi-sense strand
ggacuugacacagguucuguu

SEQ ID NO: 14214 - RNA, 21 nt, RNAi-antisense strand
cagaaccugugucaaguccuu

SEQ ID NO: 14215 - DNA, 21 bp, Homo sapiens
gacttgacacaggttctgctg

SEQ ID NO: 14216 - RNA, 21 nt, RNAi-sense strand
cuugacacagguucugcuguu

SEQ ID NO: 14217 - RNA, 21 nt, RNAi-antisense strand
cagcagaaccugugucaaguu

SEQ ID NO: 14218 - DNA, 21 bp, Homo sapiens
gacacaggttctgctgagttg

SEQ ID NO: 14219 - RNA, 21 nt, RNAi-sense strand
cacagguucugcugaguuguu

SEQ ID NO: 14220 - RNA, 21 nt, RNAi-antisense strand
caacucagcagaaccuguguu

SEQ ID NO: 14221 - DNA, 21 bp, Homo sapiens
gagttgtcactgctgctccag

SEQ ID NO: 14222 - RNA, 21 nt, RNAi-sense strand
guugucacugcugcuccaguu

SEQ ID NO: 14223 - RNA, 21 nt, RNAi-antisense strand
cuggagcagcagugacaacuu

SEQ ID NO: 14224 - DNA, 21 bp, Homo sapiens
gactcacctagagatgctgcc

SEQ ID NO: 14225 - RNA, 21 nt, RNAi-sense strand
cucaccuagagaugcugccuu

SEQ ID NO: 14226 - RNA, 21 nt, RNAi-antisense strand
ggcagcaucucuaggugaguu

SEQ ID NO: 14227 - DNA, 21 bp, Homo sapiens
gagatgctgcctccactttcc

SEQ ID NO: 14228 - RNA, 21 nt, RNAi-sense strand
gaugcugccuccacuuuccuu

SEQ ID NO: 14229 - RNA, 21 nt, RNAi-antisense strand
ggaaaguggaggcagcaucuu

SEQ ID NO: 14230 - DNA, 21 bp, Homo sapiens
gatgctgcctccactttccat

SEQ ID NO: 14231 - RNA, 21 nt, RNAi-sense strand
ugcugccuccacuuuccauuu

SEQ ID NO: 14232 - RNA, 21 nt, RNAi-antisense strand
auggaaaguggaggcagcauu

SEQ ID NO: 14233 - DNA, 21 bp, Homo sapiens
gagcataaaggtctctcagga

SEQ ID NO: 14234 - RNA, 21 nt, RNAi-sense strand
gcauaaaggucucucaggauu

SEQ ID NO: 14235 - RNA, 21 nt, RNAi-antisense strand
uccugagagaccuuuaugcuu

SEQ ID NO: 14236 - DNA, 21 bp, Homo sapiens
gagactgagtttcactcttgt

SEQ ID NO: 14237 - RNA, 21 nt, RNAi-sense strand
gacugaguuucacucuuguuu

SEQ ID NO: 14238 - RNA, 21 nt, RNAi-antisense strand
acaagagugaaacucagucuu

SEQ ID NO: 14239 - DNA, 21 bp, Homo sapiens
gactgagtttcactcttgttg

SEQ ID NO: 14240 - RNA, 21 nt, RNAi-sense strand
cugaguuucacucuuguuguu

SEQ ID NO: 14241 - RNA, 21 nt, RNAi-antisense strand
caacaagagugaaacucaguu

SEQ ID NO: 14242 - DNA, 21 bp, Homo sapiens
gagtgcaatggcaccatctcg

SEQ ID NO: 14243 - RNA, 21 nt, RNAi-sense strand
gugcaauggcaccaucucguu

SEQ ID NO: 14244 - RNA, 21 nt, RNAi-antisense strand
cgagauggugccauugcacuu

SEQ ID NO: 14245 - DNA, 21 bp, Homo sapiens
gattctcaggcctcagcttcc

SEQ ID NO: 14246 - RNA, 21 nt, RNAi-sense strand
uucucaggccucagcuuccuu

SEQ ID NO: 14247 - RNA, 21 nt, RNAi-antisense strand
ggaagcugaggccugagaauu

SEQ ID NO: 14248 - DNA, 21 bp, Homo sapiens
gattacaggcgcctgccacca

SEQ ID NO: 14249 - RNA, 21 nt, RNAi-sense strand
uuacaggcgccugccaccauu

SEQ ID NO: 14250 - RNA, 21 nt, RNAi-antisense strand
ugguggcaggcgccuguaauu

SEQ ID NO: 14251 - DNA, 21 bp, Homo sapiens
gattacaggcgtgagccaccg

SEQ ID NO: 14252 - RNA, 21 nt, RNAi-sense strand
uuacaggcgugagccaccguu

SEQ ID NO: 14253 - RNA, 21 nt, RNAi-antisense strand
cgguggcucacgccuguaauu

SEQ ID NO: 14254 - DNA, 21 bp, Homo sapiens
gaagtgaggaggatactgaac

SEQ ID NO: 14255 - RNA, 21 nt, RNAi-sense strand
agugaggaggauacugaacuu

SEQ ID NO: 14256 - RNA, 21 nt, RNAi-antisense strand
guucaguauccuccucacuuu

SEQ ID NO: 14257 - DNA, 21 bp, Homo sapiens
gaggaggatactgaacaggat

SEQ ID NO: 14258 - RNA, 21 nt, RNAi-sense strand
ggaggauacugaacaggauuu

SEQ ID NO: 14259 - RNA, 21 nt, RNAi-antisense strand
auccuguucaguauccuccuu

SEQ ID NO: 14260 - DNA, 21 bp, Homo sapiens
gaggatactgaacaggatgtg

SEQ ID NO: 14261 - RNA, 21 nt, RNAi-sense strand
ggauacugaacaggauguguu

SEQ ID NO: 14262 - RNA, 21 nt, RNAi-antisense strand
cacauccuguucaguauccuu

SEQ ID NO: 14263 - DNA, 21 bp, Homo sapiens
gatactgaacaggatgtggct

SEQ ID NO: 14264 - RNA, 21 nt, RNAi-sense strand
uacugaacaggauguggcuuu

SEQ ID NO: 14265 - RNA, 21 nt, RNAi-antisense strand
agccacauccuguucaguauu

SEQ ID NO: 14266 - DNA, 21 bp, Homo sapiens
gaacaggatgtggctaaagcc

SEQ ID NO: 14267 - RNA, 21 nt, RNAi-sense strand
acaggauguggcuaaagccuu

SEQ ID NO: 14268 - RNA, 21 nt, RNAi-antisense strand
ggcuuuagccacauccuguuu

SEQ ID NO: 14269 - DNA, 21 bp, Homo sapiens
gatgtggctaaagccaacctg

SEQ ID NO: 14270 - RNA, 21 nt, RNAi-sense strand
uguggcuaaagccaaccuguu

SEQ ID NO: 14271 - RNA, 21 nt, RNAi-antisense strand
cagguuggcuuuagccacauu

SEQ ID NO: 14272 - DNA, 21 bp, Homo sapiens
gaggaaagtattgtgaagaca

SEQ ID NO: 14273 - RNA, 21 nt, RNAi-sense strand
ggaaaguauugugaagacauu

SEQ ID NO: 14274 - RNA, 21 nt, RNAi-antisense strand
ugucuucacaauacuuuccuu

SEQ ID NO: 14275 - DNA, 21 bp, Homo sapiens
gaaagtattgtgaagacaggc

SEQ ID NO: 14276 - RNA, 21 nt, RNAi-sense strand
aaguauugugaagacaggcuu

SEQ ID NO: 14277 - RNA, 21 nt, RNAi-antisense strand
gccugucuucacaauacuuuu

SEQ ID NO: 14278 - DNA, 21 bp, Homo sapiens
gaagacaggcttcttggagta

SEQ ID NO: 14279 - RNA, 21 nt, RNAi-sense strand
agacaggcuucuuggaguauu

SEQ ID NO: 14280 - RNA, 21 nt, RNAi-antisense strand
uacuccaagaagccugucuuu

SEQ ID NO: 14281 - DNA, 21 bp, Homo sapiens
gacactctaggctcggaggct

SEQ ID NO: 14282 - RNA, 21 nt, RNAi-sense strand
cacucuaggcucggaggcuuu

SEQ ID NO: 14283 - RNA, 21 nt, RNAi-antisense strand
agccuccgagccuagaguguu

SEQ ID NO: 14284 - DNA, 21 bp, Homo sapiens
gaggctgccactgtagttgcc

SEQ ID NO: 14285 - RNA, 21 nt, RNAi-sense strand
ggcugccacuguaguugccuu

SEQ ID NO: 14286 - RNA, 21 nt, RNAi-antisense strand
ggcaacuacaguggcagccuu

SEQ ID NO: 14287 - DNA, 21 bp, Homo sapiens
gaggagaaataagtatcatac

SEQ ID NO: 14288 - RNA, 21 nt, RNAi-sense strand
ggagaaauaaguaucauacuu

SEQ ID NO: 14289 - RNA, 21 nt, RNAi-antisense strand
guaugauacuuauuucuccuu

SEQ ID NO: 14290 - DNA, 21 bp, Homo sapiens
gatgtggttgcctcaaggcag

SEQ ID NO: 14291 - RNA, 21 nt, RNAi-sense strand
ugugguugccucaaggcaguu

SEQ ID NO: 14292 - RNA, 21 nt, RNAi-antisense strand
cugccuugaggcaaccacauu

SEQ ID NO: 14293 - DNA, 21 bp, Homo sapiens
gatcaatggtcgtggcaggtc

SEQ ID NO: 14294 - RNA, 21 nt, RNAi-sense strand
ucaauggucguggcaggucuu

SEQ ID NO: 14295 - RNA, 21 nt, RNAi-antisense strand
gaccugccacgaccauugauu

SEQ ID NO: 14296 - DNA, 21 bp, Homo sapiens
gacttctctccagcagcaaag

SEQ ID NO: 14297 - RNA, 21 nt, RNAi-sense strand
cuucucuccagcagcaaaguu

SEQ ID NO: 14298 - RNA, 21 nt, RNAi-antisense strand
cuuugcugcuggagagaaguu

SEQ ID NO: 14299 - DNA, 21 bp, Homo sapiens
gatcctgagcaagcttaacgg

SEQ ID NO: 14300 - RNA, 21 nt, RNAi-sense strand
uccugagcaagcuuaacgguu

SEQ ID NO: 14301 - RNA, 21 nt, RNAi-antisense strand
ccguuaagcuugcucaggauu

SEQ ID NO: 14302 - DNA, 21 bp, Homo sapiens
gactggagtgcatgttgacac

SEQ ID NO: 14303 - RNA, 21 nt, RNAi-sense strand
cuggagugcauguugacacuu

SEQ ID NO: 14304 - RNA, 21 nt, RNAi-antisense strand
gugucaacaugcacuccaguu

SEQ ID NO: 14305 - DNA, 21 bp, Homo sapiens
gagtgcatgttgacaccagca

SEQ ID NO: 14306 - RNA, 21 nt, RNAi-sense strand
gugcauguugacaccagcauu

SEQ ID NO: 14307 - RNA, 21 nt, RNAi-antisense strand
ugcuggugucaacaugcacuu

SEQ ID NO: 14308 - DNA, 21 bp, Homo sapiens
gagtaacaggccaccaagcgg

SEQ ID NO: 14309 - RNA, 21 nt, RNAi-sense strand
guaacaggccaccaagcgguu

SEQ ID NO: 14310 - RNA, 21 nt, RNAi-antisense strand
ccgcuugguggccuguuacuu

SEQ ID NO: 14311 - DNA, 21 bp, Homo sapiens
gacattccaaccaccaccagc

SEQ ID NO: 14312 - RNA, 21 nt, RNAi-sense strand
cauuccaaccaccaccagcuu

SEQ ID NO: 14313 - RNA, 21 nt, RNAi-antisense strand
gcugguggugguuggaauguu

SEQ ID NO: 14314 - DNA, 21 bp, Homo sapiens
gacattacagccaaccttgct

SEQ ID NO: 14315 - RNA, 21 nt, RNAi-sense strand
cauuacagccaaccuugcuuu

SEQ ID NO: 14316 - RNA, 21 nt, RNAi-antisense strand
agcaagguuggcuguaauguu

SEQ ID NO: 14317 - DNA, 21 bp, Homo sapiens
gattgtcacaagcaggacctt

SEQ ID NO: 14318 - RNA, 21 nt, RNAi-sense strand
uugucacaagcaggaccuuuu

SEQ ID NO: 14319 - RNA, 21 nt, RNAi-antisense strand
aagguccugcuugugacaauu

SEQ ID NO: 14320 - DNA, 21 bp, Homo sapiens
gaggaggaaactcctctccac

SEQ ID NO: 14321 - RNA, 21 nt, RNAi-sense strand
ggaggaaacuccucuccacuu

SEQ ID NO: 14322 - RNA, 21 nt, RNAi-antisense strand
guggagaggaguuuccuccuu

SEQ ID NO: 14323 - DNA, 21 bp, Homo sapiens
gaggaaactcctctccacaaa

SEQ ID NO: 14324 - RNA, 21 nt, RNAi-sense strand
ggaaacuccucuccacaaauu

SEQ ID NO: 14325 - RNA, 21 nt, RNAi-antisense strand
uuuguggagaggaguuuccuu

SEQ ID NO: 14326 - DNA, 21 bp, Homo sapiens
gaaactcctctccacaaatcc

SEQ ID NO: 14327 - RNA, 21 nt, RNAi-sense strand
aacuccucuccacaaauccuu

SEQ ID NO: 14328 - RNA, 21 nt, RNAi-antisense strand
ggauuuguggagaggaguuuu

SEQ ID NO: 14329 - DNA, 21 bp, Homo sapiens
gatatgcaaagacgcttaaac

SEQ ID NO: 14330 - RNA, 21 nt, RNAi-sense strand
uaugcaaagacgcuuaaacuu

SEQ ID NO: 14331 - RNA, 21 nt, RNAi-antisense strand
guuuaagcgucuuugcauauu

SEQ ID NO: 14332 - DNA, 21 bp, Homo sapiens
taaattctgcactttgacagt

SEQ ID NO: 14333 - RNA, 21 nt, RNAi-sense strand
aauucugcacuuugacaguuu

SEQ ID NO: 14334 - RNA, 21 nt, RNAi-antisense strand
acugucaaagugcagaauuuu

SEQ ID NO: 14335 - DNA, 21 bp, Homo sapiens
tattgagaagagagaagaggt

SEQ ID NO: 14336 - RNA, 21 nt, RNAi-sense strand
uugagaagagagaagagguuu

SEQ ID NO: 14337 - RNA, 21 nt, RNAi-antisense strand
accucuucucucuucucaauu

SEQ ID NO: 14338 - DNA, 21 bp, Homo sapiens
taaatcatggacaccagagaa

SEQ ID NO: 14339 - RNA, 21 nt, RNAi-sense strand
aaucauggacaccagagaauu

SEQ ID NO: 14340 - RNA, 21 nt, RNAi-antisense strand
uucucugguguccaugauuuu

SEQ ID NO: 14341 - DNA, 21 bp, Homo sapiens
taaggtggacctcaggaatcc

SEQ ID NO: 14342 - RNA, 21 nt, RNAi-sense strand
agguggaccucaggaauccuu

SEQ ID NO: 14343 - RNA, 21 nt, RNAi-antisense strand
ggauuccugagguccaccuuu

SEQ ID NO: 14344 - DNA, 21 bp, Homo sapiens
tatagccatctctggaaccta

SEQ ID NO: 14345 - RNA, 21 nt, RNAi-sense strand
uagccaucucuggaaccuauu

SEQ ID NO: 14346 - RNA, 21 nt, RNAi-antisense strand
uagguuccagagauggcuauu

SEQ ID NO: 14347 - DNA, 21 bp, Homo sapiens
tagccatctctggaacctaaa

SEQ ID NO: 14348 - RNA, 21 nt, RNAi-sense strand
gccaucucuggaaccuaaauu

SEQ ID NO: 14349 - RNA, 21 nt, RNAi-antisense strand
uuuagguuccagagauggcuu

SEQ ID NO: 14350 - DNA, 21 bp, Homo sapiens
taccatgagaaacagcgcagg

SEQ ID NO: 14351 - RNA, 21 nt, RNAi-sense strand
ccaugagaaacagcgcagguu

SEQ ID NO: 14352 - RNA, 21 nt, RNAi-antisense strand
ccugcgcuguuucucaugguu

SEQ ID NO: 14353 - DNA, 21 bp, Homo sapiens
taacgtcttccaggacagcaa

SEQ ID NO: 14354 - RNA, 21 nt, RNAi-sense strand
acgucuuccaggacagcaauu

SEQ ID NO: 14355 - RNA, 21 nt, RNAi-antisense strand
uugcuguccuggaagacguuu

SEQ ID NO: 14356 - DNA, 21 bp, Homo sapiens
tacgatgtgaatgtcattatg

SEQ ID NO: 14357 - RNA, 21 nt, RNAi-sense strand
cgaugugaaugucauuauguu

SEQ ID NO: 14358 - RNA, 21 nt, RNAi-antisense strand
cauaaugacauucacaucguu

SEQ ID NO: 14359 - DNA, 21 bp, Homo sapiens
tatggcagcacttcagaccaa

SEQ ID NO: 14360 - RNA, 21 nt, RNAi-sense strand
uggcagcacuucagaccaauu

SEQ ID NO: 14361 - RNA, 21 nt, RNAi-antisense strand
uuggucugaagugcugccauu

SEQ ID NO: 14362 - DNA, 21 bp, Homo sapiens
tactacaacctcgactccaaa

SEQ ID NO: 14363 - RNA, 21 nt, RNAi-sense strand
cuacaaccucgacuccaaauu

SEQ ID NO: 14364 - RNA, 21 nt, RNAi-antisense strand
uuuggagucgagguuguaguu

SEQ ID NO: 14365 - DNA, 21 bp, Homo sapiens
tacaacctcgactccaaactc

SEQ ID NO: 14366 - RNA, 21 nt, RNAi-sense strand
caaccucgacuccaaacucuu

SEQ ID NO: 14367 - RNA, 21 nt, RNAi-antisense strand
gaguuuggagucgagguuguu

SEQ ID NO: 14368 - DNA, 21 bp, Homo sapiens
taccagaagaggtagaggctc

SEQ ID NO: 14369 - RNA, 21 nt, RNAi-sense strand
ccagaagagguagaggcucuu

SEQ ID NO: 14370 - RNA, 21 nt, RNAi-antisense strand
gagccucuaccucuucugguu

SEQ ID NO: 14371 - DNA, 21 bp, Homo sapiens
tagaggctcatcagagttgga

SEQ ID NO: 14372 - RNA, 21 nt, RNAi-sense strand
gaggcucaucagaguuggauu

SEQ ID NO: 14373 - RNA, 21 nt, RNAi-antisense strand
uccaacucugaugagccucuu

SEQ ID NO: 14374 - DNA, 21 bp, Homo sapiens
taggacagacgtgtggactgt

SEQ ID NO: 14375 - RNA, 21 nt, RNAi-sense strand
ggacagacguguggacuguuu

SEQ ID NO: 14376 - RNA, 21 nt, RNAi-antisense strand
acaguccacacgucuguccuu

SEQ ID NO: 14377 - DNA, 21 bp, Homo sapiens
taggagttctgtgcacttaag

SEQ ID NO: 14378 - RNA, 21 nt, RNAi-sense strand
ggaguucugugcacuuaaguu

SEQ ID NO: 14379 - RNA, 21 nt, RNAi-antisense strand
cuuaagugcacagaacuccuu

SEQ ID NO: 14380 - DNA, 21 bp, Homo sapiens
taaggccagtggtcacaaacc

SEQ ID NO: 14381 - RNA, 21 nt, RNAi-sense strand
aggccaguggucacaaaccuu

SEQ ID NO: 14382 - RNA, 21 nt, RNAi-antisense strand
gguuugugaccacuggccuuu

SEQ ID NO: 14383 - DNA, 21 bp, Homo sapiens
tatttaagagacagaggagaa

SEQ ID NO: 14384 - RNA, 21 nt, RNAi-sense strand
uuuaagagacagaggagaauu

SEQ ID NO: 14385 - RNA, 21 nt, RNAi-antisense strand
uucuccucugucucuuaaauu

SEQ ID NO: 14386 - DNA, 21 bp, Homo sapiens
taagagacagaggagaaagtg

SEQ ID NO: 14387 - RNA, 21 nt, RNAi-sense strand
agagacagaggagaaaguguu

SEQ ID NO: 14388 - RNA, 21 nt, RNAi-antisense strand
cacuuucuccucugucucuuu

SEQ ID NO: 14389 - DNA, 21 bp, Homo sapiens
tatgaggacttgacacaggtt

SEQ ID NO: 14390 - RNA, 21 nt, RNAi-sense strand
ugaggacuugacacagguuuu

SEQ ID NO: 14391 - RNA, 21 nt, RNAi-antisense strand
aaccugugucaaguccucauu

SEQ ID NO: 14392 - DNA, 21 bp, Homo sapiens
tagagatgctgcctccacttt

SEQ ID NO: 14393 - RNA, 21 nt, RNAi-sense strand
gagaugcugccuccacuuuuu

SEQ ID NO: 14394 - RNA, 21 nt, RNAi-antisense strand
aaaguggaggcagcaucucuu

SEQ ID NO: 14395 - DNA, 21 bp, Homo sapiens
taaaggtctctcaggaaacca

SEQ ID NO: 14396 - RNA, 21 nt, RNAi-sense strand
aaggucucucaggaaaccauu

SEQ ID NO: 14397 - RNA, 21 nt, RNAi-antisense strand
ugguuuccugagagaccuuuu

SEQ ID NO: 14398 - DNA, 21 bp, Homo sapiens
tagcagcggtacagcatgctg

SEQ ID NO: 14399 - RNA, 21 nt, RNAi-sense strand
gcagcgguacagcaugcuguu

SEQ ID NO: 14400 - RNA, 21 nt, RNAi-antisense strand
cagcaugcuguaccgcugcuu

SEQ ID NO: 14401 - DNA, 21 bp, Homo sapiens
tacagcatgctgtctccaacc

SEQ ID NO: 14402 - RNA, 21 nt, RNAi-sense strand
cagcaugcugucuccaaccuu

SEQ ID NO: 14403 - RNA, 21 nt, RNAi-antisense strand
gguuggagacagcaugcuguu

SEQ ID NO: 14404 - DNA, 21 bp, Homo sapiens
tatggccatacgtggaggttt

SEQ ID NO: 14405 - RNA, 21 nt, RNAi-sense strand
uggccauacguggagguuuuu

SEQ ID NO: 14406 - RNA, 21 nt, RNAi-antisense strand
aaaccuccacguauggccauu

SEQ ID NO: 14407 - DNA, 21 bp, Homo sapiens
tattctagtatgaagtgagga

SEQ ID NO: 14408 - RNA, 21 nt, RNAi-sense strand
uucuaguaugaagugaggauu

SEQ ID NO: 14409 - RNA, 21 nt, RNAi-antisense strand
uccucacuucauacuagaauu

SEQ ID NO: 14410 - DNA, 21 bp, Homo sapiens
tagtatgaagtgaggaggata

SEQ ID NO: 14411 - RNA, 21 nt, RNAi-sense strand
guaugaagugaggaggauauu

SEQ ID NO: 14412 - RNA, 21 nt, RNAi-antisense strand
uauccuccucacuucauacuu

SEQ ID NO: 14413 - DNA, 21 bp, Homo sapiens
tatgaagtgaggaggatactg

SEQ ID NO: 14414 - RNA, 21 nt, RNAi-sense strand
ugaagugaggaggauacuguu

SEQ ID NO: 14415 - RNA, 21 nt, RNAi-antisense strand
caguauccuccucacuucauu

SEQ ID NO: 14416 - DNA, 21 bp, Homo sapiens
tactgaacaggatgtggctaa

SEQ ID NO: 14417 - RNA, 21 nt, RNAi-sense strand
cugaacaggauguggcuaauu

SEQ ID NO: 14418 - RNA, 21 nt, RNAi-antisense strand
uuagccacauccuguucaguu

SEQ ID NO: 14419 - DNA, 21 bp, Homo sapiens
taccatttcgcagcattgatt

SEQ ID NO: 14420 - RNA, 21 nt, RNAi-sense strand
ccauuucgcagcauugauuuu

SEQ ID NO: 14421 - RNA, 21 nt, RNAi-antisense strand
aaucaaugcugcgaaaugguu

SEQ ID NO: 14422 - DNA, 21 bp, Homo sapiens
tattgtgaagacaggcttctt

SEQ ID NO: 14423 - RNA, 21 nt, RNAi-sense strand
uugugaagacaggcuucuuuu

SEQ ID NO: 14424 - RNA, 21 nt, RNAi-antisense strand
aagaagccugucuucacaauu

SEQ ID NO: 14425 - DNA, 21 bp, Homo sapiens
tagacactctaggctcggagg

SEQ ID NO: 14426 - RNA, 21 nt, RNAi-sense strand
gacacucuaggcucggagguu

SEQ ID NO: 14427 - RNA, 21 nt, RNAi-antisense strand
ccuccgagccuagagugucuu

SEQ ID NO: 14428 - DNA, 21 bp, Homo sapiens
tagttgccaagctcaggttgg

SEQ ID NO: 14429 - RNA, 21 nt, RNAi-sense strand
guugccaagcucagguugguu

SEQ ID NO: 14430 - RNA, 21 nt, RNAi-antisense strand
ccaaccugagcuuggcaacuu

SEQ ID NO: 14431 - DNA, 21 bp, Homo sapiens
tatggatggaataggacctgg

SEQ ID NO: 14432 - RNA, 21 nt, RNAi-sense strand
uggauggaauaggaccugguu

SEQ ID NO: 14433 - RNA, 21 nt, RNAi-antisense strand
ccagguccuauuccauccauu

SEQ ID NO: 14434 - DNA, 21 bp, Homo sapiens
tacctcttcagatagttgtag

SEQ ID NO: 14435 - RNA, 21 nt, RNAi-sense strand
ccucuucagauaguuguaguu

SEQ ID NO: 14436 - RNA, 21 nt, RNAi-antisense strand
cuacaacuaucugaagagguu

SEQ ID NO: 14437 - DNA, 21 bp, Homo sapiens
taagtatcataccatatgcgt

SEQ ID NO: 14438 - RNA, 21 nt, RNAi-sense strand
aguaucauaccauaugcguuu

SEQ ID NO: 14439 - RNA, 21 nt, RNAi-antisense strand
acgcauaugguaugauacuuu

SEQ ID NO: 14440 - DNA, 21 bp, Homo sapiens
tatcataccatatgcgtgtct

SEQ ID NO: 14441 - RNA, 21 nt, RNAi-sense strand
ucauaccauaugcgugucuuu

SEQ ID NO: 14442 - RNA, 21 nt, RNAi-antisense strand
agacacgcauaugguaugauu

SEQ ID NO: 14443 - DNA, 21 bp, Homo sapiens
taccatatgcgtgtctccaaa

SEQ ID NO: 14444 - RNA, 21 nt, RNAi-sense strand
ccauaugcgugucuccaaauu

SEQ ID NO: 14445 - RNA, 21 nt, RNAi-antisense strand
uuuggagacacgcauaugguu

SEQ ID NO: 14446 - DNA, 21 bp, Homo sapiens
tatgcgtgtctccaaagtgga

SEQ ID NO: 14447 - RNA, 21 nt, RNAi-sense strand
ugcgugucuccaaaguggauu

SEQ ID NO: 14448 - RNA, 21 nt, RNAi-antisense strand
uccacuuuggagacacgcauu

SEQ ID NO: 14449 - DNA, 21 bp, Homo sapiens
tatcttcaatccaacaaggcc

SEQ ID NO: 14450 - RNA, 21 nt, RNAi-sense strand
ucuucaauccaacaaggccuu

SEQ ID NO: 14451 - RNA, 21 nt, RNAi-antisense strand
ggccuuguuggauugaagauu

SEQ ID NO: 14452 - DNA, 21 bp, Homo sapiens
taatgctgagtaacaggccac

SEQ ID NO: 14453 - RNA, 21 nt, RNAi-sense strand
augcugaguaacaggccacuu

SEQ ID NO: 14454 - RNA, 21 nt, RNAi-antisense strand
guggccuguuacucagcauuu

SEQ ID NO: 14455 - DNA, 21 bp, Homo sapiens
taacaggccaccaagcggcta

SEQ ID NO: 14456 - RNA, 21 nt, RNAi-sense strand
acaggccaccaagcggcuauu

SEQ ID NO: 14457 - RNA, 21 nt, RNAi-antisense strand
uagccgcuugguggccuguuu

SEQ ID NO: 14458 - DNA, 21 bp, Homo sapiens
tactgcgttatatcttctcag

SEQ ID NO: 14459 - RNA, 21 nt, RNAi-sense strand
cugcguuauaucuucucaguu

SEQ ID NO: 14460 - RNA, 21 nt, RNAi-antisense strand
cugagaagauauaacgcaguu

SEQ ID NO: 14461 - DNA, 21 bp, Homo sapiens
tatatcttctcagcaactggc

SEQ ID NO: 14462 - RNA, 21 nt, RNAi-sense strand
uaucuucucagcaacuggcuu

SEQ ID NO: 14463 - RNA, 21 nt, RNAi-antisense strand
gccaguugcugagaagauauu

SEQ ID NO: 14464 - DNA, 21 bp, Homo sapiens
tatcttctcagcaactggccg

SEQ ID NO: 14465 - RNA, 21 nt, RNAi-sense strand
ucuucucagcaacuggccguu

SEQ ID NO: 14466 - RNA, 21 nt, RNAi-antisense strand
cggccaguugcugagaagauu

SEQ ID NO: 14467 - DNA, 21 bp, Homo sapiens
tacaccagacctgcttggcac

SEQ ID NO: 14468 - RNA, 21 nt, RNAi-sense strand
caccagaccugcuuggcacuu

SEQ ID NO: 14469 - RNA, 21 nt, RNAi-antisense strand
gugccaagcaggucugguguu

SEQ ID NO: 14470 - DNA, 21 bp, Homo sapiens
tacagccaaccttgctgattg

SEQ ID NO: 14471 - RNA, 21 nt, RNAi-sense strand
cagccaaccuugcugauuguu

SEQ ID NO: 14472 - RNA, 21 nt, RNAi-antisense strand
caaucagcaagguuggcuguu

SEQ ID NO: 14473 - DNA, 21 bp, Homo sapiens
tagaggaggaaactcctctcc

SEQ ID NO: 14474 - RNA, 21 nt, RNAi-sense strand
gaggaggaaacuccucuccuu

SEQ ID NO: 14475 - RNA, 21 nt, RNAi-antisense strand
ggagaggaguuuccuccucuu

SEQ ID NO: 14476 - DNA, 21 bp, Homo sapiens
tatgcaaagacgcttaaacat

SEQ ID NO: 14477 - RNA, 21 nt, RNAi-sense strand
ugcaaagacgcuuaaacauuu

SEQ ID NO: 14478 - RNA, 21 nt, RNAi-antisense strand
auguuuaagcgucuuugcauu

SEQ ID NO: 14479 - DNA, 21 bp, Homo sapiens
tatccaattctggtgcttagg

SEQ ID NO: 14480 - RNA, 21 nt, RNAi-sense strand
uccaauucuggugcuuagguu

SEQ ID NO: 14481 - RNA, 21 nt, RNAi-antisense strand
ccuaagcaccagaauuggauu

SEQ ID NO: 14482 - DNA, 21 bp, Homo sapiens
taaggaagtgaacaggcctga

SEQ ID NO: 14483 - RNA, 21 nt, RNAi-sense strand
aggaagugaacaggccugauu

SEQ ID NO: 14484 - RNA, 21 nt, RNAi-antisense strand
ucaggccuguucacuuccuuu

SEQ ID NO: 14485 - DNA, 21 bp, Homo sapiens
aaatggcaactacgatgtgaa

SEQ ID NO: 14486 - RNA, 21 nt, RNAi-sense strand
auggcaacuacgaugugaauu

SEQ ID NO: 14487 - RNA, 21 nt, RNAi-antisense strand
uucacaucguaguugccauuu

SEQ ID NO: 14488 - DNA, 21 bp, Homo sapiens
aatggcaactacgatgtgaat

SEQ ID NO: 14489 - RNA, 21 nt, RNAi-sense strand
uggcaacuacgaugugaauuu

SEQ ID NO: 14490 - RNA, 21 nt, RNAi-antisense strand
auucacaucguaguugccauu

SEQ ID NO: 14491 - DNA, 21 bp, Homo sapiens
cacttcagaccaaaggctatg

SEQ ID NO: 14492 - RNA, 21 nt, RNAi-sense strand
cuucagaccaaaggcuauguu

SEQ ID NO: 14493 - RNA, 21 nt, RNAi-antisense strand
cauagccuuuggucugaaguu

SEQ ID NO: 14494 - DNA, 21 bp, Homo sapiens
cactggatctgtgttcgagag

SEQ ID NO: 14495 - RNA, 21 nt, RNAi-sense strand
cuggaucuguguucgagaguu

SEQ ID NO: 14496 - RNA, 21 nt, RNAi-antisense strand
cucucgaacacagauccaguu

SEQ ID NO: 14497 - DNA, 21 bp, Homo sapiens
caacctcgactccaaactcaa

SEQ ID NO: 14498 - RNA, 21 nt, RNAi-sense strand
accucgacuccaaacucaauu

SEQ ID NO: 14499 - RNA, 21 nt, RNAi-antisense strand
uugaguuuggagucgagguuu

SEQ ID NO: 14500 - DNA, 21 bp, Homo sapiens
gaaatggcaactacgatgtga

SEQ ID NO: 14501 - RNA, 21 nt, RNAi-sense strand
aauggcaacuacgaugugauu

SEQ ID NO: 14502 - RNA, 21 nt, RNAi-antisense strand
ucacaucguaguugccauuuu

SEQ ID NO: 14503 - DNA, 21 bp, Homo sapiens
tactacaacctcgactccaaa

SEQ ID NO: 14504 - RNA, 21 nt, RNAi-sense strand
cuacaaccucgacuccaaauu

SEQ ID NO: 14505 - RNA, 21 nt, RNAi-antisense strand
uuuggagucgagguuguaguu

SEQ ID NO: 14506 - DNA, 21 bp, Homo sapiens
tacaacctcgactccaaactc

SEQ ID NO: 14507 - RNA, 21 nt, RNAi-sense strand
caaccucgacuccaaacucuu

SEQ ID NO: 14508 - RNA, 21 nt, RNAi-antisense strand
gaguuuggagucgagguuguu

SEQ ID NO: 14509 - DNA, 21 bp, Homo sapiens
aaaggtctggtggataagctt

SEQ ID NO: 14510 - RNA, 21 nt, RNAi-sense strand
aggucugguggauaagcuuuu

SEQ ID NO: 14511 - RNA, 21 nt, RNAi-antisense strand
aagcuuauccaccagaccuuu

SEQ ID NO: 14512 - DNA, 21 bp, Homo sapiens
aaggtctggtggataagcttc

SEQ ID NO: 14513 - RNA, 21 nt, RNAi-sense strand
ggucugguggauaagcuucuu

SEQ ID NO: 14514 - RNA, 21 nt, RNAi-antisense strand
gaagcuuauccaccagaccuu

SEQ ID NO: 14515 - DNA, 21 bp, Homo sapiens
aagcttcaagcgttaaccggc

SEQ ID NO: 14516 - RNA, 21 nt, RNAi-sense strand
gcuucaagcguuaaccggcuu

SEQ ID NO: 14517 - RNA, 21 nt, RNAi-antisense strand
gccgguuaacgcuugaagcuu

SEQ ID NO: 14518 - DNA, 21 bp, Homo sapiens
aagcgttaaccggcaatgagg

SEQ ID NO: 14519 - RNA, 21 nt, RNAi-sense strand
gcguuaaccggcaaugagguu

SEQ ID NO: 14520 - RNA, 21 nt, RNAi-antisense strand
ccucauugccgguuaacgcuu

SEQ ID NO: 14521 - DNA, 21 bp, Homo sapiens
aaacatcaagcagctgttgca

SEQ ID NO: 14522 - RNA, 21 nt, RNAi-sense strand
acaucaagcagcuguugcauu

SEQ ID NO: 14523 - RNA, 21 nt, RNAi-antisense strand
ugcaacagcugcuugauguuu

SEQ ID NO: 14524 - DNA, 21 bp, Homo sapiens
aacatcaagcagctgttgcaa

SEQ ID NO: 14525 - RNA, 21 nt, RNAi-sense strand
caucaagcagcuguugcaauu

SEQ ID NO: 14526 - RNA, 21 nt, RNAi-antisense strand
uugcaacagcugcuugauguu

SEQ ID NO: 14527 - DNA, 21 bp, Homo sapiens
aagcagctgttgcaatgttta

SEQ ID NO: 14528 - RNA, 21 nt, RNAi-sense strand
gcagcuguugcaauguuuauu

SEQ ID NO: 14529 - RNA, 21 nt, RNAi-antisense strand
uaaacauugcaacagcugcuu

SEQ ID NO: 14530 - DNA, 21 bp, Homo sapiens
aagcaccactctgcacagtgc

SEQ ID NO: 14531 - RNA, 21 nt, RNAi-sense strand
gcaccacucugcacagugcuu

SEQ ID NO: 14532 - RNA, 21 nt, RNAi-antisense strand
gcacugugcagaguggugcuu

SEQ ID NO: 14533 - DNA, 21 bp, Homo sapiens
aaggagccagtagagacagct

SEQ ID NO: 14534 - RNA, 21 nt, RNAi-sense strand
ggagccaguagagacagcuuu

SEQ ID NO: 14535 - RNA, 21 nt, RNAi-antisense strand
agcugucucuacuggcuccuu

SEQ ID NO: 14536 - DNA, 21 bp, Homo sapiens
aacaatagcaaagtgaagaca

SEQ ID NO: 14537 - RNA, 21 nt, RNAi-sense strand
caauagcaaagugaagacauu

SEQ ID NO: 14538 - RNA, 21 nt, RNAi-antisense strand
ugucuucacuuugcuauuguu

SEQ ID NO: 14539 - DNA, 21 bp, Homo sapiens
aatagcaaagtgaagacagca

SEQ ID NO: 14540 - RNA, 21 nt, RNAi-sense strand
uagcaaagugaagacagcauu

SEQ ID NO: 14541 - RNA, 21 nt, RNAi-antisense strand
ugcugucuucacuuugcuauu

SEQ ID NO: 14542 - DNA, 21 bp, Homo sapiens
aaagtgaagacagcatctaag

SEQ ID NO: 14543 - RNA, 21 nt, RNAi-sense strand
agugaagacagcaucuaaguu

SEQ ID NO: 14544 - RNA, 21 nt, RNAi-antisense strand
cuuagaugcugucuucacuuu

SEQ ID NO: 14545 - DNA, 21 bp, Homo sapiens
aagtgaagacagcatctaagc

SEQ ID NO: 14546 - RNA, 21 nt, RNAi-sense strand
gugaagacagcaucuaagcuu

SEQ ID NO: 14547 - RNA, 21 nt, RNAi-antisense strand
gcuuagaugcugucuucacuu

SEQ ID NO: 14548 - DNA, 21 bp, Homo sapiens
aagacagcatctaagctgtgt

SEQ ID NO: 14549 - RNA, 21 nt, RNAi-sense strand
gacagcaucuaagcuguguuu

SEQ ID NO: 14550 - RNA, 21 nt, RNAi-antisense strand
acacagcuuagaugcugucuu

SEQ ID NO: 14551 - DNA, 21 bp, Homo sapiens
aagtacagtctgttcgagaac

SEQ ID NO: 14552 - RNA, 21 nt, RNAi-sense strand
guacagucuguucgagaacuu

SEQ ID NO: 14553 - RNA, 21 nt, RNAi-antisense strand
guucucgaacagacuguacuu

SEQ ID NO: 14554 - DNA, 21 bp, Homo sapiens
aacaccttggtcatgaaagtg

SEQ ID NO: 14555 - RNA, 21 nt, RNAi-sense strand
caccuuggucaugaaaguguu

SEQ ID NO: 14556 - RNA, 21 nt, RNAi-antisense strand
cacuuucaugaccaagguguu

SEQ ID NO: 14557 - DNA, 21 bp, Homo sapiens
aaagtgacaacctgctgtttg

SEQ ID NO: 14558 - RNA, 21 nt, RNAi-sense strand
agugacaaccugcuguuuguu

SEQ ID NO: 14559 - RNA, 21 nt, RNAi-antisense strand
caaacagcagguugucacuuu

SEQ ID NO: 14560 - DNA, 21 bp, Homo sapiens
aagtgacaacctgctgtttgt

SEQ ID NO: 14561 - RNA, 21 nt, RNAi-sense strand
gugacaaccugcuguuuguuu

SEQ ID NO: 14562 - RNA, 21 nt, RNAi-antisense strand
acaaacagcagguugucacuu

SEQ ID NO: 14563 - DNA, 21 bp, Homo sapiens
aacctgctgtttgttcagatc

SEQ ID NO: 14564 - RNA, 21 nt, RNAi-sense strand
ccugcuguuuguucagaucuu

SEQ ID NO: 14565 - RNA, 21 nt, RNAi-antisense strand
gaucugaacaaacagcagguu

SEQ ID NO: 14566 - DNA, 21 bp, Homo sapiens
aagctttccatcaccaagaag

SEQ ID NO: 14567 - RNA, 21 nt, RNAi-sense strand
gcuuuccaucaccaagaaguu

SEQ ID NO: 14568 - RNA, 21 nt, RNAi-antisense strand
cuucuuggugauggaaagcuu

SEQ ID NO: 14569 - DNA, 21 bp, Homo sapiens
aagaagtcttctccttcagtg

SEQ ID NO: 14570 - RNA, 21 nt, RNAi-sense strand
gaagucuucuccuucaguguu

SEQ ID NO: 14571 - RNA, 21 nt, RNAi-antisense strand
cacugaaggagaagacuucuu

SEQ ID NO: 14572 - DNA, 21 bp, Homo sapiens
aagtcttctccttcagtgaaa

SEQ ID NO: 14573 - RNA, 21 nt, RNAi-sense strand
gucuucuccuucagugaaauu

SEQ ID NO: 14574 - RNA, 21 nt, RNAi-antisense strand
uuucacugaaggagaagacuu

SEQ ID NO: 14575 - DNA, 21 bp, Homo sapiens
aacgatatggaggacgacagc

SEQ ID NO: 14576 - RNA, 21 nt, RNAi-sense strand
cgauauggaggacgacagcuu

SEQ ID NO: 14577 - RNA, 21 nt, RNAi-antisense strand
gcugucguccuccauaucguu

SEQ ID NO: 14578 - DNA, 21 bp, Homo sapiens
aactcaccgttggcctcttga

SEQ ID NO: 14579 - RNA, 21 nt, RNAi-sense strand
cucaccguuggccucuugauu

SEQ ID NO: 14580 - RNA, 21 nt, RNAi-antisense strand
ucaagaggccaacggugaguu

SEQ ID NO: 14581 - DNA, 21 bp, Homo sapiens
aagtttcctctcgaagcctgc

SEQ ID NO: 14582 - RNA, 21 nt, RNAi-sense strand
guuuccucucgaagccugcuu

SEQ ID NO: 14583 - RNA, 21 nt, RNAi-antisense strand
gcaggcuucgagaggaaacuu

SEQ ID NO: 14584 - DNA, 21 bp, Homo sapiens
aagcctgcagtcactttagct

SEQ ID NO: 14585 - RNA, 21 nt, RNAi-sense strand
gccugcagucacuuuagcuuu

SEQ ID NO: 14586 - RNA, 21 nt, RNAi-antisense strand
agcuaaagugacugcaggcuu

SEQ ID NO: 14587 - DNA, 21 bp, Homo sapiens
aacactctccaggatctcatt

SEQ ID NO: 14588 - RNA, 21 nt, RNAi-sense strand
cacucuccaggaucucauuuu

SEQ ID NO: 14589 - RNA, 21 nt, RNAi-antisense strand
aaugagauccuggagaguguu

SEQ ID NO: 14590 - DNA, 21 bp, Homo sapiens
aagatttgaagaagccagatc

SEQ ID NO: 14591 - RNA, 21 nt, RNAi-sense strand
gauuugaagaagccagaucuu

SEQ ID NO: 14592 - RNA, 21 nt, RNAi-antisense strand
gaucuggcuucuucaaaucuu

SEQ ID NO: 14593 - DNA, 21 bp, Homo sapiens
aagaagccagatccagcttcc

SEQ ID NO: 14594 - RNA, 21 nt, RNAi-sense strand
gaagccagauccagcuuccuu

SEQ ID NO: 14595 - RNA, 21 nt, RNAi-antisense strand
ggaagcuggaucuggcuucuu

SEQ ID NO: 14596 - DNA, 21 bp, Homo sapiens
aaagaggaaggcctgtaagaa

SEQ ID NO: 14597 - RNA, 21 nt, RNAi-sense strand
agaggaaggccuguaagaauu

SEQ ID NO: 14598 - RNA, 21 nt, RNAi-antisense strand
uucuuacaggccuuccucuuu

SEQ ID NO: 14599 - DNA, 21 bp, Homo sapiens
aagaggaaggcctgtaagaac

SEQ ID NO: 14600 - RNA, 21 nt, RNAi-sense strand
gaggaaggccuguaagaacuu

SEQ ID NO: 14601 - RNA, 21 nt, RNAi-antisense strand
guucuuacaggccuuccucuu

SEQ ID NO: 14602 - DNA, 21 bp, Homo sapiens
aaggcctgtaagaactgcacc

SEQ ID NO: 14603 - RNA, 21 nt, RNAi-sense strand
ggccuguaagaacugcaccuu

SEQ ID NO: 14604 - RNA, 21 nt, RNAi-antisense strand
ggugcaguucuuacaggccuu

SEQ ID NO: 14605 - DNA, 21 bp, Homo sapiens
aagaactgcacctgtggcctt

SEQ ID NO: 14606 - RNA, 21 nt, RNAi-sense strand
gaacugcaccuguggccuuuu

SEQ ID NO: 14607 - RNA, 21 nt, RNAi-antisense strand
aaggccacaggugcaguucuu

SEQ ID NO: 14608 - DNA, 21 bp, Homo sapiens
aactgcacctgtggccttgct

SEQ ID NO: 14609 - RNA, 21 nt, RNAi-sense strand
cugcaccuguggccuugcuuu

SEQ ID NO: 14610 - RNA, 21 nt, RNAi-antisense strand
agcaaggccacaggugcaguu

SEQ ID NO: 14611 - DNA, 21 bp, Homo sapiens
aagtcagcttgtggaaactgc

SEQ ID NO: 14612 - RNA, 21 nt, RNAi-sense strand
gucagcuuguggaaacugcuu

SEQ ID NO: 14613 - RNA, 21 nt, RNAi-antisense strand
gcaguuuccacaagcugacuu

SEQ ID NO: 14614 - DNA, 21 bp, Homo sapiens
aaaggtgcttctgagtgatag

SEQ ID NO: 14615 - RNA, 21 nt, RNAi-sense strand
aggugcuucugagugauaguu

SEQ ID NO: 14616 - RNA, 21 nt, RNAi-antisense strand
cuaucacucagaagcaccuuu

SEQ ID NO: 14617 - DNA, 21 bp, Homo sapiens
aaggtgcttctgagtgatagc

SEQ ID NO: 14618 - RNA, 21 nt, RNAi-sense strand
ggugcuucugagugauagcuu

SEQ ID NO: 14619 - RNA, 21 nt, RNAi-antisense strand
gcuaucacucagaagcaccuu

SEQ ID NO: 14620 - DNA, 21 bp, Homo sapiens
aatcttcatgatgcctaggag

SEQ ID NO: 14621 - RNA, 21 nt, RNAi-sense strand
ucuucaugaugccuaggaguu

SEQ ID NO: 14622 - RNA, 21 nt, RNAi-antisense strand
cuccuaggcaucaugaagauu

SEQ ID NO: 14623 - DNA, 21 bp, Homo sapiens
aaatgctgaccagaacgctct

SEQ ID NO: 14624 - RNA, 21 nt, RNAi-sense strand
augcugaccagaacgcucuuu

SEQ ID NO: 14625 - RNA, 21 nt, RNAi-antisense strand
agagcguucuggucagcauuu

SEQ ID NO: 14626 - DNA, 21 bp, Homo sapiens
aatgctgaccagaacgctctt

SEQ ID NO: 14627 - RNA, 21 nt, RNAi-sense strand
ugcugaccagaacgcucuuuu

SEQ ID NO: 14628 - RNA, 21 nt, RNAi-antisense strand
aagagcguucuggucagcauu

SEQ ID NO: 14629 - DNA, 21 bp, Homo sapiens
aacactctgtgacagagctgc

SEQ ID NO: 14630 - RNA, 21 nt, RNAi-sense strand
cacucugugacagagcugcuu

SEQ ID NO: 14631 - RNA, 21 nt, RNAi-antisense strand
gcagcucugucacagaguguu

SEQ ID NO: 14632 - DNA, 21 bp, Homo sapiens
aagtggctcacaacctcctca

SEQ ID NO: 14633 - RNA, 21 nt, RNAi-sense strand
guggcucacaaccuccucauu

SEQ ID NO: 14634 - RNA, 21 nt, RNAi-antisense strand
ugaggagguugugagccacuu

SEQ ID NO: 14635 - DNA, 21 bp, Homo sapiens
aaccacatttgactgtagcat

SEQ ID NO: 14636 - RNA, 21 nt, RNAi-sense strand
ccacauuugacuguagcauuu

SEQ ID NO: 14637 - RNA, 21 nt, RNAi-antisense strand
augcuacagucaaaugugguu

SEQ ID NO: 14638 - DNA, 21 bp, Homo sapiens
aaccttcaggtattaaacttg

SEQ ID NO: 14639 - RNA, 21 nt, RNAi-sense strand
ccuucagguauuaaacuuguu

SEQ ID NO: 14640 - RNA, 21 nt, RNAi-antisense strand
caaguuuaauaccugaagguu

SEQ ID NO: 14641 - DNA, 21 bp, Homo sapiens
aaacttgctgcatatcttgac

SEQ ID NO: 14642 - RNA, 21 nt, RNAi-sense strand
acuugcugcauaucuugacuu

SEQ ID NO: 14643 - RNA, 21 nt, RNAi-antisense strand
gucaagauaugcagcaaguuu

SEQ ID NO: 14644 - DNA, 21 bp, Homo sapiens
aacttgctgcatatcttgaca

SEQ ID NO: 14645 - RNA, 21 nt, RNAi-sense strand
cuugcugcauaucuugacauu

SEQ ID NO: 14646 - RNA, 21 nt, RNAi-antisense strand
ugucaagauaugcagcaaguu

SEQ ID NO: 14647 - DNA, 21 bp, Homo sapiens
aacttagtgtcacgcacaaat

SEQ ID NO: 14648 - RNA, 21 nt, RNAi-sense strand
cuuagugucacgcacaaauuu

SEQ ID NO: 14649 - RNA, 21 nt, RNAi-antisense strand
auuugugcgugacacuaaguu

SEQ ID NO: 14650 - DNA, 21 bp, Homo sapiens
aagagtccaggttggtgagca

SEQ ID NO: 14651 - RNA, 21 nt, RNAi-sense strand
gaguccagguuggugagcauu

SEQ ID NO: 14652 - RNA, 21 nt, RNAi-antisense strand
ugcucaccaaccuggacucuu

SEQ ID NO: 14653 - DNA, 21 bp, Homo sapiens
aactctgaacgacaatacgtc

SEQ ID NO: 14654 - RNA, 21 nt, RNAi-sense strand
cucugaacgacaauacgucuu

SEQ ID NO: 14655 - RNA, 21 nt, RNAi-antisense strand
gacguauugucguucagaguu

SEQ ID NO: 14656 - DNA, 21 bp, Homo sapiens
aacgacaatacgtctctctga

SEQ ID NO: 14657 - RNA, 21 nt, RNAi-sense strand
cgacaauacgucucucugauu

SEQ ID NO: 14658 - RNA, 21 nt, RNAi-antisense strand
ucagagagacguauugucguu

SEQ ID NO: 14659 - DNA, 21 bp, Homo sapiens
aatacgtctctctgagcagag

SEQ ID NO: 14660 - RNA, 21 nt, RNAi-sense strand
uacgucucucugagcagaguu

SEQ ID NO: 14661 - RNA, 21 nt, RNAi-antisense strand
cucugcucagagagacguauu

SEQ ID NO: 14662 - DNA, 21 bp, Homo sapiens
aatcttgccaaatatttggag

SEQ ID NO: 14663 - RNA, 21 nt, RNAi-sense strand
ucuugccaaauauuuggaguu

SEQ ID NO: 14664 - RNA, 21 nt, RNAi-antisense strand
cuccaaauauuuggcaagauu

SEQ ID NO: 14665 - DNA, 21 bp, Homo sapiens
aatatttggagagattgtgtg

SEQ ID NO: 14666 - RNA, 21 nt, RNAi-sense strand
uauuuggagagauuguguguu

SEQ ID NO: 14667 - RNA, 21 nt, RNAi-antisense strand
cacacaaucucuccaaauauu

SEQ ID NO: 14668 - DNA, 21 bp, Homo sapiens
cagtttgtggcagtggtctgg

SEQ ID NO: 14669 - RNA, 21 nt, RNAi-sense strand
guuuguggcaguggucugguu

SEQ ID NO: 14670 - RNA, 21 nt, RNAi-antisense strand
ccagaccacugccacaaacuu

SEQ ID NO: 14671 - DNA, 21 bp, Homo sapiens
cagtggaggctctgaaaggtc

SEQ ID NO: 14672 - RNA, 21 nt, RNAi-sense strand
guggaggcucugaaaggucuu

SEQ ID NO: 14673 - RNA, 21 nt, RNAi-antisense strand
gaccuuucagagccuccacuu

SEQ ID NO: 14674 - DNA, 21 bp, Homo sapiens
caagcgttaaccggcaatgag

SEQ ID NO: 14675 - RNA, 21 nt, RNAi-sense strand
agcguuaaccggcaaugaguu

SEQ ID NO: 14676 - RNA, 21 nt, RNAi-antisense strand
cucauugccgguuaacgcuuu

SEQ ID NO: 14677 - DNA, 21 bp, Homo sapiens
catcaagcagctgttgcaatg

SEQ ID NO: 14678 - RNA, 21 nt, RNAi-sense strand
ucaagcagcuguugcaauguu

SEQ ID NO: 14679 - RNA, 21 nt, RNAi-antisense strand
cauugcaacagcugcuugauu

SEQ ID NO: 14680 - DNA, 21 bp, Homo sapiens
caagcagctgttgcaatgttt

SEQ ID NO: 14681 - RNA, 21 nt, RNAi-sense strand
agcagcuguugcaauguuuuu

SEQ ID NO: 14682 - RNA, 21 nt, RNAi-antisense strand
aaacauugcaacagcugcuuu

SEQ ID NO: 14683 - DNA, 21 bp, Homo sapiens
cagctgttgcaatgtttagtc

SEQ ID NO: 14684 - RNA, 21 nt, RNAi-sense strand
gcuguugcaauguuuagucuu

SEQ ID NO: 14685 - RNA, 21 nt, RNAi-antisense strand
gacuaaacauugcaacagcuu

SEQ ID NO: 14686 - DNA, 21 bp, Homo sapiens
caggaagcaccactctgcaca

SEQ ID NO: 14687 - RNA, 21 nt, RNAi-sense strand
ggaagcaccacucugcacauu

SEQ ID NO: 14688 - RNA, 21 nt, RNAi-antisense strand
ugugcagaguggugcuuccuu

SEQ ID NO: 14689 - DNA, 21 bp, Homo sapiens
caccactctgcacagtgctga

SEQ ID NO: 14690 - RNA, 21 nt, RNAi-sense strand
ccacucugcacagugcugauu

SEQ ID NO: 14691 - RNA, 21 nt, RNAi-antisense strand
ucagcacugugcagagugguu

SEQ ID NO: 14692 - DNA, 21 bp, Homo sapiens
cactctgcacagtgctgagat

SEQ ID NO: 14693 - RNA, 21 nt, RNAi-sense strand
cucugcacagugcugagauuu

SEQ ID NO: 14694 - RNA, 21 nt, RNAi-antisense strand
aucucagcacugugcagaguu

SEQ ID NO: 14695 - DNA, 21 bp, Homo sapiens
cagtagagacagctgtagata

SEQ ID NO: 14696 - RNA, 21 nt, RNAi-sense strand
guagagacagcuguagauauu

SEQ ID NO: 14697 - RNA, 21 nt, RNAi-antisense strand
uaucuacagcugucucuacuu

SEQ ID NO: 14698 - DNA, 21 bp, Homo sapiens
cagctgtagataacaatagca

SEQ ID NO: 14699 - RNA, 21 nt, RNAi-sense strand
gcuguagauaacaauagcauu

SEQ ID NO: 14700 - RNA, 21 nt, RNAi-antisense strand
ugcuauuguuaucuacagcuu

SEQ ID NO: 14701 - DNA, 21 bp, Homo sapiens
caatagcaaagtgaagacagc

SEQ ID NO: 14702 - RNA, 21 nt, RNAi-sense strand
auagcaaagugaagacagcuu

SEQ ID NO: 14703 - RNA, 21 nt, RNAi-antisense strand
gcugucuucacuuugcuauuu

SEQ ID NO: 14704 - DNA, 21 bp, Homo sapiens
caaagtgaagacagcatctaa

SEQ ID NO: 14705 - RNA, 21 nt, RNAi-sense strand
aagugaagacagcaucuaauu

SEQ ID NO: 14706 - RNA, 21 nt, RNAi-antisense strand
uuagaugcugucuucacuuuu

SEQ ID NO: 14707 - DNA, 21 bp, Homo sapiens
cagcatctaagctgtgttcag

SEQ ID NO: 14708 - RNA, 21 nt, RNAi-sense strand
gcaucuaagcuguguucaguu

SEQ ID NO: 14709 - RNA, 21 nt, RNAi-antisense strand
cugaacacagcuuagaugcuu

SEQ ID NO: 14710 - DNA, 21 bp, Homo sapiens
cagtctgttcgagaacacctt

SEQ ID NO: 14711 - RNA, 21 nt, RNAi-sense strand
gucuguucgagaacaccuuuu

SEQ ID NO: 14712 - RNA, 21 nt, RNAi-antisense strand
aagguguucucgaacagacuu

SEQ ID NO: 14713 - DNA, 21 bp, Homo sapiens
caccttggtcatgaaagtgac

SEQ ID NO: 14714 - RNA, 21 nt, RNAi-sense strand
ccuuggucaugaaagugacuu

SEQ ID NO: 14715 - RNA, 21 nt, RNAi-antisense strand
gucacuuucaugaccaagguu

SEQ ID NO: 14716 - DNA, 21 bp, Homo sapiens
catgaaagtgacaacctgctg

SEQ ID NO: 14717 - RNA, 21 nt, RNAi-sense strand
ugaaagugacaaccugcuguu

SEQ ID NO: 14718 - RNA, 21 nt, RNAi-antisense strand
cagcagguugucacuuucauu

SEQ ID NO: 14719 - DNA, 21 bp, Homo sapiens
caacctgctgtttgttcagat

SEQ ID NO: 14720 - RNA, 21 nt, RNAi-sense strand
accugcuguuuguucagauuu

SEQ ID NO: 14721 - RNA, 21 nt, RNAi-antisense strand
aucugaacaaacagcagguuu

SEQ ID NO: 14722 - DNA, 21 bp, Homo sapiens
cagcttaagctttccatcacc

SEQ ID NO: 14723 - RNA, 21 nt, RNAi-sense strand
gcuuaagcuuuccaucaccuu

SEQ ID NO: 14724 - RNA, 21 nt, RNAi-antisense strand
ggugauggaaagcuuaagcuu

SEQ ID NO: 14725 - DNA, 21 bp, Homo sapiens
catcaccaagaagtcttctcc

SEQ ID NO: 14726 - RNA, 21 nt, RNAi-sense strand
ucaccaagaagucuucuccuu

SEQ ID NO: 14727 - RNA, 21 nt, RNAi-antisense strand
ggagaagacuucuuggugauu

SEQ ID NO: 14728 - DNA, 21 bp, Homo sapiens
caccaagaagtcttctccttc

SEQ ID NO: 14729 - RNA, 21 nt, RNAi-sense strand
ccaagaagucuucuccuucuu

SEQ ID NO: 14730 - RNA, 21 nt, RNAi-antisense strand
gaaggagaagacuucuugguu

SEQ ID NO: 14731 - DNA, 21 bp, Homo sapiens
caagaagtcttctccttcagt

SEQ ID NO: 14732 - RNA, 21 nt, RNAi-sense strand
agaagucuucuccuucaguuu

SEQ ID NO: 14733 - RNA, 21 nt, RNAi-antisense strand
acugaaggagaagacuucuuu

SEQ ID NO: 14734 - DNA, 21 bp, Homo sapiens
cagtgaaacctgctgtggacc

SEQ ID NO: 14735 - RNA, 21 nt, RNAi-sense strand
gugaaaccugcuguggaccuu

SEQ ID NO: 14736 - RNA, 21 nt, RNAi-antisense strand
gguccacagcagguuucacuu

SEQ ID NO: 14737 - DNA, 21 bp, Homo sapiens
cagccaacgatatggaggacg

SEQ ID NO: 14738 - RNA, 21 nt, RNAi-sense strand
gccaacgauauggaggacguu

SEQ ID NO: 14739 - RNA, 21 nt, RNAi-antisense strand
cguccuccauaucguuggcuu

SEQ ID NO: 14740 - DNA, 21 bp, Homo sapiens
caacgatatggaggacgacag

SEQ ID NO: 14741 - RNA, 21 nt, RNAi-sense strand
acgauauggaggacgacaguu

SEQ ID NO: 14742 - RNA, 21 nt, RNAi-antisense strand
cugucguccuccauaucguuu

SEQ ID NO: 14743 - DNA, 21 bp, Homo sapiens
cagcatgtgcatcttctgtgg

SEQ ID NO: 14744 - RNA, 21 nt, RNAi-sense strand
gcaugugcaucuucugugguu

SEQ ID NO: 14745 - RNA, 21 nt, RNAi-antisense strand
ccacagaagaugcacaugcuu

SEQ ID NO: 14746 - DNA, 21 bp, Homo sapiens
catgtgcatcttctgtggatg

SEQ ID NO: 14747 - RNA, 21 nt, RNAi-sense strand
ugugcaucuucuguggauguu

SEQ ID NO: 14748 - RNA, 21 nt, RNAi-antisense strand
cauccacagaagaugcacauu

SEQ ID NO: 14749 - DNA, 21 bp, Homo sapiens
catcttctgtggatgtagttt

SEQ ID NO: 14750 - RNA, 21 nt, RNAi-sense strand
ucuucuguggauguaguuuuu

SEQ ID NO: 14751 - RNA, 21 nt, RNAi-antisense strand
aaacuacauccacagaagauu

SEQ ID NO: 14752 - DNA, 21 bp, Homo sapiens
caccgttggcctcttgagcat

SEQ ID NO: 14753 - RNA, 21 nt, RNAi-sense strand
ccguuggccucuugagcauuu

SEQ ID NO: 14754 - RNA, 21 nt, RNAi-antisense strand
augcucaagaggccaacgguu

SEQ ID NO: 14755 - DNA, 21 bp, Homo sapiens
catgtggtcaggttgaacatg

SEQ ID NO: 14756 - RNA, 21 nt, RNAi-sense strand
uguggucagguugaacauguu

SEQ ID NO: 14757 - RNA, 21 nt, RNAi-antisense strand
cauguucaaccugaccacauu

SEQ ID NO: 14758 - DNA, 21 bp, Homo sapiens
caggttgaacatgatgatcaa

SEQ ID NO: 14759 - RNA, 21 nt, RNAi-sense strand
gguugaacaugaugaucaauu

SEQ ID NO: 14760 - RNA, 21 nt, RNAi-antisense strand
uugaucaucauguucaaccuu

SEQ ID NO: 14761 - DNA, 21 bp, Homo sapiens
caagtttcctctcgaagcctg

SEQ ID NO: 14762 - RNA, 21 nt, RNAi-sense strand
aguuuccucucgaagccuguu

SEQ ID NO: 14763 - RNA, 21 nt, RNAi-antisense strand
caggcuucgagaggaaacuuu

SEQ ID NO: 14764 - DNA, 21 bp, Homo sapiens
cattagcagagaccacgactg

SEQ ID NO: 14765 - RNA, 21 nt, RNAi-sense strand
uuagcagagaccacgacuguu

SEQ ID NO: 14766 - RNA, 21 nt, RNAi-antisense strand
cagucguggucucugcuaauu

SEQ ID NO: 14767 - DNA, 21 bp, Homo sapiens
cagagaccacgactgtatcac

SEQ ID NO: 14768 - RNA, 21 nt, RNAi-sense strand
gagaccacgacuguaucacuu

SEQ ID NO: 14769 - RNA, 21 nt, RNAi-antisense strand
gugauacagucguggucucuu

SEQ ID NO: 14770 - DNA, 21 bp, Homo sapiens
cacgactgtatcactcattgc

SEQ ID NO: 14771 - RNA, 21 nt, RNAi-sense strand
cgacuguaucacucauugcuu

SEQ ID NO: 14772 - RNA, 21 nt, RNAi-antisense strand
gcaaugagugauacagucguu

SEQ ID NO: 14773 - DNA, 21 bp, Homo sapiens
cactcattgctttgaacactc

SEQ ID NO: 14774 - RNA, 21 nt, RNAi-sense strand
cucauugcuuugaacacucuu

SEQ ID NO: 14775 - RNA, 21 nt, RNAi-antisense strand
gaguguucaaagcaaugaguu

SEQ ID NO: 14776 - DNA, 21 bp, Homo sapiens
cattgctttgaacactctcca

SEQ ID NO: 14777 - RNA, 21 nt, RNAi-sense strand
uugcuuugaacacucuccauu

SEQ ID NO: 14778 - RNA, 21 nt, RNAi-antisense strand
uggagaguguucaaagcaauu

SEQ ID NO: 14779 - DNA, 21 bp, Homo sapiens
cactctccaggatctcattga

SEQ ID NO: 14780 - RNA, 21 nt, RNAi-sense strand
cucuccaggaucucauugauu

SEQ ID NO: 14781 - RNA, 21 nt, RNAi-antisense strand
ucaaugagauccuggagaguu

SEQ ID NO: 14782 - DNA, 21 bp, Homo sapiens
caggatctcattgactcagat

SEQ ID NO: 14783 - RNA, 21 nt, RNAi-sense strand
ggaucucauugacucagauuu

SEQ ID NO: 14784 - RNA, 21 nt, RNAi-antisense strand
aucugagucaaugagauccuu

SEQ ID NO: 14785 - DNA, 21 bp, Homo sapiens
cattgactcagatgagctgct

SEQ ID NO: 14786 - RNA, 21 nt, RNAi-sense strand
uugacucagaugagcugcuuu

SEQ ID NO: 14787 - RNA, 21 nt, RNAi-antisense strand
agcagcucaucugagucaauu

SEQ ID NO: 14788 - DNA, 21 bp, Homo sapiens
cagatgagctgctggatccag

SEQ ID NO: 14789 - RNA, 21 nt, RNAi-sense strand
gaugagcugcuggauccaguu

SEQ ID NO: 14790 - RNA, 21 nt, RNAi-antisense strand
cuggauccagcagcucaucuu

SEQ ID NO: 14791 - DNA, 21 bp, Homo sapiens
cagaagatttgaagaagccag

SEQ ID NO: 14792 - RNA, 21 nt, RNAi-sense strand
gaagauuugaagaagccaguu

SEQ ID NO: 14793 - RNA, 21 nt, RNAi-antisense strand
cuggcuucuucaaaucuucuu

SEQ ID NO: 14794 - DNA, 21 bp, Homo sapiens
cacctgtggccttgctgaaga

SEQ ID NO: 14795 - RNA, 21 nt, RNAi-sense strand
ccuguggccuugcugaagauu

SEQ ID NO: 14796 - RNA, 21 nt, RNAi-antisense strand
ucuucagcaaggccacagguu

SEQ ID NO: 14797 - DNA, 21 bp, Homo sapiens
caagtcagcttgtggaaactg

SEQ ID NO: 14798 - RNA, 21 nt, RNAi-sense strand
agucagcuuguggaaacuguu

SEQ ID NO: 14799 - RNA, 21 nt, RNAi-antisense strand
caguuuccacaagcugacuuu

SEQ ID NO: 14800 - DNA, 21 bp, Homo sapiens
cagcttgtggaaactgctacc

SEQ ID NO: 14801 - RNA, 21 nt, RNAi-sense strand
gcuuguggaaacugcuaccuu

SEQ ID NO: 14802 - RNA, 21 nt, RNAi-antisense strand
gguagcaguuuccacaagcuu

SEQ ID NO: 14803 - DNA, 21 bp, Homo sapiens
caatcttcatgatgcctagga

SEQ ID NO: 14804 - RNA, 21 nt, RNAi-sense strand
aucuucaugaugccuaggauu

SEQ ID NO: 14805 - RNA, 21 nt, RNAi-antisense strand
uccuaggcaucaugaagauuu

SEQ ID NO: 14806 - DNA, 21 bp, Homo sapiens
catgatgcctaggaggttcct

SEQ ID NO: 14807 - RNA, 21 nt, RNAi-sense strand
ugaugccuaggagguuccuuu

SEQ ID NO: 14808 - RNA, 21 nt, RNAi-antisense strand
aggaaccuccuaggcaucauu

SEQ ID NO: 14809 - DNA, 21 bp, Homo sapiens
catctgctcctccagccaact

SEQ ID NO: 14810 - RNA, 21 nt, RNAi-sense strand
ucugcuccuccagccaacuuu

SEQ ID NO: 14811 - RNA, 21 nt, RNAi-antisense strand
aguuggcuggaggagcagauu

SEQ ID NO: 14812 - DNA, 21 bp, Homo sapiens
cacctcctctggatttgttca

SEQ ID NO: 14813 - RNA, 21 nt, RNAi-sense strand
ccuccucuggauuuguucauu

SEQ ID NO: 14814 - RNA, 21 nt, RNAi-antisense strand
ugaacaaauccagaggagguu

SEQ ID NO: 14815 - DNA, 21 bp, Homo sapiens
cactctgagatctgtttgcag

SEQ ID NO: 14816 - RNA, 21 nt, RNAi-sense strand
cucugagaucuguuugcaguu

SEQ ID NO: 14817 - RNA, 21 nt, RNAi-antisense strand
cugcaaacagaucucagaguu

SEQ ID NO: 14818 - DNA, 21 bp, Homo sapiens
cagacagagtgaagctggctg

SEQ ID NO: 14819 - RNA, 21 nt, RNAi-sense strand
gacagagugaagcuggcuguu

SEQ ID NO: 14820 - RNA, 21 nt, RNAi-antisense strand
cagccagcuucacucugucuu

SEQ ID NO: 14821 - DNA, 21 bp, Homo sapiens
cacagtggtgtgtagtgctgc

SEQ ID NO: 14822 - RNA, 21 nt, RNAi-sense strand
cagugguguguagugcugcuu

SEQ ID NO: 14823 - RNA, 21 nt, RNAi-antisense strand
gcagcacuacacaccacuguu

SEQ ID NO: 14824 - DNA, 21 bp, Homo sapiens
cagtggtgtgtagtgctgctg

SEQ ID NO: 14825 - RNA, 21 nt, RNAi-sense strand
gugguguguagugcugcuguu

SEQ ID NO: 14826 - RNA, 21 nt, RNAi-antisense strand
cagcagcacuacacaccacuu

SEQ ID NO: 14827 - DNA, 21 bp, Homo sapiens
caggcatcgttgagcattaac

SEQ ID NO: 14828 - RNA, 21 nt, RNAi-sense strand
ggcaucguugagcauuaacuu

SEQ ID NO: 14829 - RNA, 21 nt, RNAi-antisense strand
guuaaugcucaacgaugccuu

SEQ ID NO: 14830 - DNA, 21 bp, Homo sapiens
catcgttgagcattaacactc

SEQ ID NO: 14831 - RNA, 21 nt, RNAi-sense strand
ucguugagcauuaacacucuu

SEQ ID NO: 14832 - RNA, 21 nt, RNAi-antisense strand
gaguguuaaugcucaacgauu

SEQ ID NO: 14833 - DNA, 21 bp, Homo sapiens
cattaacactctgtgacagag

SEQ ID NO: 14834 - RNA, 21 nt, RNAi-sense strand
uuaacacucugugacagaguu

SEQ ID NO: 14835 - RNA, 21 nt, RNAi-antisense strand
cucugucacagaguguuaauu

SEQ ID NO: 14836 - DNA, 21 bp, Homo sapiens
cactctgtgacagagctgcag

SEQ ID NO: 14837 - RNA, 21 nt, RNAi-sense strand
cucugugacagagcugcaguu

SEQ ID NO: 14838 - RNA, 21 nt, RNAi-antisense strand
cugcagcucugucacagaguu

SEQ ID NO: 14839 - DNA, 21 bp, Homo sapiens
catctcagcaatgctgccacc

SEQ ID NO: 14840 - RNA, 21 nt, RNAi-sense strand
ucucagcaaugcugccaccuu

SEQ ID NO: 14841 - RNA, 21 nt, RNAi-antisense strand
gguggcagcauugcugagauu

SEQ ID NO: 14842 - DNA, 21 bp, Homo sapiens
cagagttgttagtttactcca

SEQ ID NO: 14843 - RNA, 21 nt, RNAi-sense strand
gaguuguuaguuuacuccauu

SEQ ID NO: 14844 - RNA, 21 nt, RNAi-antisense strand
uggaguaaacuaacaacucuu

SEQ ID NO: 14845 - DNA, 21 bp, Homo sapiens
cattctttgtgacacgagtca

SEQ ID NO: 14846 - RNA, 21 nt, RNAi-sense strand
uucuuugugacacgagucauu

SEQ ID NO: 14847 - RNA, 21 nt, RNAi-antisense strand
ugacucgugucacaaagaauu

SEQ ID NO: 14848 - DNA, 21 bp, Homo sapiens
cacgagtcaagtggctcacaa

SEQ ID NO: 14849 - RNA, 21 nt, RNAi-sense strand
cgagucaaguggcucacaauu

SEQ ID NO: 14850 - RNA, 21 nt, RNAi-antisense strand
uugugagccacuugacucguu

SEQ ID NO: 14851 - DNA, 21 bp, Homo sapiens
caagtggctcacaacctcctc

SEQ ID NO: 14852 - RNA, 21 nt, RNAi-sense strand
aguggcucacaaccuccucuu

SEQ ID NO: 14853 - RNA, 21 nt, RNAi-antisense strand
gaggagguugugagccacuuu

SEQ ID NO: 14854 - DNA, 21 bp, Homo sapiens
caccagaggactcactcactg

SEQ ID NO: 14855 - RNA, 21 nt, RNAi-sense strand
ccagaggacucacucacuguu

SEQ ID NO: 14856 - RNA, 21 nt, RNAi-antisense strand
cagugagugaguccucugguu

SEQ ID NO: 14857 - DNA, 21 bp, Homo sapiens
cagaggactcactcactggtt

SEQ ID NO: 14858 - RNA, 21 nt, RNAi-sense strand
gaggacucacucacugguuuu

SEQ ID NO: 14859 - RNA, 21 nt, RNAi-antisense strand
aaccagugagugaguccucuu

SEQ ID NO: 14860 - DNA, 21 bp, Homo sapiens
cactcactggttgctgtgatg

SEQ ID NO: 14861 - RNA, 21 nt, RNAi-sense strand
cucacugguugcugugauguu

SEQ ID NO: 14862 - RNA, 21 nt, RNAi-antisense strand
caucacagcaaccagugaguu

SEQ ID NO: 14863 - DNA, 21 bp, Homo sapiens
cactggttgctgtgatgatat

SEQ ID NO: 14864 - RNA, 21 nt, RNAi-sense strand
cugguugcugugaugauauuu

SEQ ID NO: 14865 - RNA, 21 nt, RNAi-antisense strand
auaucaucacagcaaccaguu

SEQ ID NO: 14866 - DNA, 21 bp, Homo sapiens
caaccacatttgactgtagca

SEQ ID NO: 14867 - RNA, 21 nt, RNAi-sense strand
accacauuugacuguagcauu

SEQ ID NO: 14868 - RNA, 21 nt, RNAi-antisense strand
ugcuacagucaaaugugguuu

SEQ ID NO: 14869 - DNA, 21 bp, Homo sapiens
cacatttgactgtagcattgc

SEQ ID NO: 14870 - RNA, 21 nt, RNAi-sense strand
cauuugacuguagcauugcuu

SEQ ID NO: 14871 - RNA, 21 nt, RNAi-antisense strand
gcaaugcuacagucaaauguu

SEQ ID NO: 14872 - DNA, 21 bp, Homo sapiens
catttgactgtagcattgcat

SEQ ID NO: 14873 - RNA, 21 nt, RNAi-sense strand
uuugacuguagcauugcauuu

SEQ ID NO: 14874 - RNA, 21 nt, RNAi-antisense strand
augcaaugcuacagucaaauu

SEQ ID NO: 14875 - DNA, 21 bp, Homo sapiens
cattgcatctgtgtcctgttg

SEQ ID NO: 14876 - RNA, 21 nt, RNAi-sense strand
uugcaucuguguccuguuguu

SEQ ID NO: 14877 - RNA, 21 nt, RNAi-antisense strand
caacaggacacagaugcaauu

SEQ ID NO: 14878 - DNA, 21 bp, Homo sapiens
catctgtgtcctgttgtcatt

SEQ ID NO: 14879 - RNA, 21 nt, RNAi-sense strand
ucuguguccuguugucauuuu

SEQ ID NO: 14880 - RNA, 21 nt, RNAi-antisense strand
aaugacaacaggacacagauu

SEQ ID NO: 14881 - DNA, 21 bp, Homo sapiens
catttatgttaaccttcaggt

SEQ ID NO: 14882 - RNA, 21 nt, RNAi-sense strand
uuuauguuaaccuucagguuu

SEQ ID NO: 14883 - RNA, 21 nt, RNAi-antisense strand
accugaagguuaacauaaauu

SEQ ID NO: 14884 - DNA, 21 bp, Homo sapiens
caggtattaaacttgctgcat

SEQ ID NO: 14885 - RNA, 21 nt, RNAi-sense strand
gguauuaaacuugcugcauuu

SEQ ID NO: 14886 - RNA, 21 nt, RNAi-antisense strand
augcagcaaguuuaauaccuu

SEQ ID NO: 14887 - DNA, 21 bp, Homo sapiens
catatcttgacatatcttgag

SEQ ID NO: 14888 - RNA, 21 nt, RNAi-sense strand
uaucuugacauaucuugaguu

SEQ ID NO: 14889 - RNA, 21 nt, RNAi-antisense strand
cucaagauaugucaagauauu

SEQ ID NO: 14890 - DNA, 21 bp, Homo sapiens
catatcttgagattctgcatg

SEQ ID NO: 14891 - RNA, 21 nt, RNAi-sense strand
uaucuugagauucugcauguu

SEQ ID NO: 14892 - RNA, 21 nt, RNAi-antisense strand
caugcagaaucucaagauauu

SEQ ID NO: 14893 - DNA, 21 bp, Homo sapiens
catttgtgtgtgatgttggat

SEQ ID NO: 14894 - RNA, 21 nt, RNAi-sense strand
uuugugugugauguuggauuu

SEQ ID NO: 14895 - RNA, 21 nt, RNAi-antisense strand
auccaacaucacacacaaauu

SEQ ID NO: 14896 - DNA, 21 bp, Homo sapiens
catccacgctcagtttggacc

SEQ ID NO: 14897 - RNA, 21 nt, RNAi-sense strand
uccacgcucaguuuggaccuu

SEQ ID NO: 14898 - RNA, 21 nt, RNAi-antisense strand
gguccaaacugagcguggauu

SEQ ID NO: 14899 - DNA, 21 bp, Homo sapiens
cacgctcagtttggaccattg

SEQ ID NO: 14900 - RNA, 21 nt, RNAi-sense strand
cgcucaguuuggaccauuguu

SEQ ID NO: 14901 - RNA, 21 nt, RNAi-antisense strand
caaugguccaaacugagcguu

SEQ ID NO: 14902 - DNA, 21 bp, Homo sapiens
cagtttggaccattggaggaa

SEQ ID NO: 14903 - RNA, 21 nt, RNAi-sense strand
guuuggaccauuggaggaauu

SEQ ID NO: 14904 - RNA, 21 nt, RNAi-antisense strand
uuccuccaaugguccaaacuu

SEQ ID NO: 14905 - DNA, 21 bp, Homo sapiens
cattggaggaacttagtgtca

SEQ ID NO: 14906 - RNA, 21 nt, RNAi-sense strand
uuggaggaacuuagugucauu

SEQ ID NO: 14907 - RNA, 21 nt, RNAi-antisense strand
ugacacuaaguuccuccaauu

SEQ ID NO: 14908 - DNA, 21 bp, Homo sapiens
cactttagaagagtccaggtt

SEQ ID NO: 14909 - RNA, 21 nt, RNAi-sense strand
cuuuagaagaguccagguuuu

SEQ ID NO: 14910 - RNA, 21 nt, RNAi-antisense strand
aaccuggacucuucuaaaguu

SEQ ID NO: 14911 - DNA, 21 bp, Homo sapiens
caggttggtgagcatttagag

SEQ ID NO: 14912 - RNA, 21 nt, RNAi-sense strand
gguuggugagcauuuagaguu

SEQ ID NO: 14913 - RNA, 21 nt, RNAi-antisense strand
cucuaaaugcucaccaaccuu

SEQ ID NO: 14914 - DNA, 21 bp, Homo sapiens
cagaactctgaacgacaatac

SEQ ID NO: 14915 - RNA, 21 nt, RNAi-sense strand
gaacucugaacgacaauacuu

SEQ ID NO: 14916 - RNA, 21 nt, RNAi-antisense strand
guauugucguucagaguucuu

SEQ ID NO: 14917 - DNA, 21 bp, Homo sapiens
caatacgtctctctgagcaga

SEQ ID NO: 14918 - RNA, 21 nt, RNAi-sense strand
auacgucucucugagcagauu

SEQ ID NO: 14919 - RNA, 21 nt, RNAi-antisense strand
ucugcucagagagacguauuu

SEQ ID NO: 14920 - DNA, 21 bp, Homo sapiens
catatggacttggaatcaatc

SEQ ID NO: 14921 - RNA, 21 nt, RNAi-sense strand
uauggacuuggaaucaaucuu

SEQ ID NO: 14922 - RNA, 21 nt, RNAi-antisense strand
gauugauuccaaguccauauu

SEQ ID NO: 14923 - DNA, 21 bp, Homo sapiens
caatcttgccaaatatttgga

SEQ ID NO: 14924 - RNA, 21 nt, RNAi-sense strand
aucuugccaaauauuuggauu

SEQ ID NO: 14925 - RNA, 21 nt, RNAi-antisense strand
uccaaauauuuggcaagauuu

SEQ ID NO: 14926 - DNA, 21 bp, Homo sapiens
caaatatttggagagattgtg

SEQ ID NO: 14927 - RNA, 21 nt, RNAi-sense strand
aauauuuggagagauuguguu

SEQ ID NO: 14928 - RNA, 21 nt, RNAi-antisense strand
cacaaucucuccaaauauuuu

SEQ ID NO: 14929 - DNA, 21 bp, Homo sapiens
cattgatatctgtccttgaaa

SEQ ID NO: 14930 - RNA, 21 nt, RNAi-sense strand
uugauaucuguccuugaaauu

SEQ ID NO: 14931 - RNA, 21 nt, RNAi-antisense strand
uuucaaggacagauaucaauu

SEQ ID NO: 14932 - DNA, 21 bp, Homo sapiens
gatctctgctggccagtttgt

SEQ ID NO: 14933 - RNA, 21 nt, RNAi-sense strand
ucucugcuggccaguuuguuu

SEQ ID NO: 14934 - RNA, 21 nt, RNAi-antisense strand
acaaacuggccagcagagauu

SEQ ID NO: 14935 - DNA, 21 bp, Homo sapiens
gaggctctgaaaggtctggtg

SEQ ID NO: 14936 - RNA, 21 nt, RNAi-sense strand
ggcucugaaaggucugguguu

SEQ ID NO: 14937 - RNA, 21 nt, RNAi-antisense strand
caccagaccuuucagagccuu

SEQ ID NO: 14938 - DNA, 21 bp, Homo sapiens
gaaaggtctggtggataagct

SEQ ID NO: 14939 - RNA, 21 nt, RNAi-sense strand
aaggucugguggauaagcuuu

SEQ ID NO: 14940 - RNA, 21 nt, RNAi-antisense strand
agcuuauccaccagaccuuuu

SEQ ID NO: 14941 - DNA, 21 bp, Homo sapiens
gataagcttcaagcgttaacc

SEQ ID NO: 14942 - RNA, 21 nt, RNAi-sense strand
uaagcuucaagcguuaaccuu

SEQ ID NO: 14943 - RNA, 21 nt, RNAi-antisense strand
gguuaacgcuugaagcuuauu

SEQ ID NO: 14944 - DNA, 21 bp, Homo sapiens
gaagcaccactctgcacagtg

SEQ ID NO: 14945 - RNA, 21 nt, RNAi-sense strand
agcaccacucugcacaguguu

SEQ ID NO: 14946 - RNA, 21 nt, RNAi-antisense strand
cacugugcagaguggugcuuu

SEQ ID NO: 14947 - DNA, 21 bp, Homo sapiens
gatccttcggcctggtggatg

SEQ ID NO: 14948 - RNA, 21 nt, RNAi-sense strand
uccuucggccugguggauguu

SEQ ID NO: 14949 - RNA, 21 nt, RNAi-antisense strand
cauccaccaggccgaaggauu

SEQ ID NO: 14950 - DNA, 21 bp, Homo sapiens
gaaggagccagtagagacagc

SEQ ID NO: 14951 - RNA, 21 nt, RNAi-sense strand
aggagccaguagagacagcuu

SEQ ID NO: 14952 - RNA, 21 nt, RNAi-antisense strand
gcugucucuacuggcuccuuu

SEQ ID NO: 14953 - DNA, 21 bp, Homo sapiens
gagccagtagagacagctgta

SEQ ID NO: 14954 - RNA, 21 nt, RNAi-sense strand
gccaguagagacagcuguauu

SEQ ID NO: 14955 - RNA, 21 nt, RNAi-antisense strand
uacagcugucucuacuggcuu

SEQ ID NO: 14956 - DNA, 21 bp, Homo sapiens
gagacagctgtagataacaat

SEQ ID NO: 14957 - RNA, 21 nt, RNAi-sense strand
gacagcuguagauaacaauuu

SEQ ID NO: 14958 - RNA, 21 nt, RNAi-antisense strand
auuguuaucuacagcugucuu

SEQ ID NO: 14959 - DNA, 21 bp, Homo sapiens
gacagctgtagataacaatag

SEQ ID NO: 14960 - RNA, 21 nt, RNAi-sense strand
cagcuguagauaacaauaguu

SEQ ID NO: 14961 - RNA, 21 nt, RNAi-antisense strand
cuauuguuaucuacagcuguu

SEQ ID NO: 14962 - DNA, 21 bp, Homo sapiens
gataacaatagcaaagtgaag

SEQ ID NO: 14963 - RNA, 21 nt, RNAi-sense strand
uaacaauagcaaagugaaguu

SEQ ID NO: 14964 - RNA, 21 nt, RNAi-antisense strand
cuucacuuugcuauuguuauu

SEQ ID NO: 14965 - DNA, 21 bp, Homo sapiens
gaagacagcatctaagctgtg

SEQ ID NO: 14966 - RNA, 21 nt, RNAi-sense strand
agacagcaucuaagcuguguu

SEQ ID NO: 14967 - RNA, 21 nt, RNAi-antisense strand
cacagcuuagaugcugucuuu

SEQ ID NO: 14968 - DNA, 21 bp, Homo sapiens
gacagcatctaagctgtgttc

SEQ ID NO: 14969 - RNA, 21 nt, RNAi-sense strand
cagcaucuaagcuguguucuu

SEQ ID NO: 14970 - RNA, 21 nt, RNAi-antisense strand
gaacacagcuuagaugcuguu

SEQ ID NO: 14971 - DNA, 21 bp, Homo sapiens
gactctttctggtcttgtgga

SEQ ID NO: 14972 - RNA, 21 nt, RNAi-sense strand
cucuuucuggucuuguggauu

SEQ ID NO: 14973 - RNA, 21 nt, RNAi-antisense strand
uccacaagaccagaaagaguu

SEQ ID NO: 14974 - DNA, 21 bp, Homo sapiens
gaagtgaaagagctgcagcgg

SEQ ID NO: 14975 - RNA, 21 nt, RNAi-sense strand
agugaaagagcugcagcgguu

SEQ ID NO: 14976 - RNA, 21 nt, RNAi-antisense strand
ccgcugcagcucuuucacuuu

SEQ ID NO: 14977 - DNA, 21 bp, Homo sapiens
gaggaagtacagtctgttcga

SEQ ID NO: 14978 - RNA, 21 nt, RNAi-sense strand
ggaaguacagucuguucgauu

SEQ ID NO: 14979 - RNA, 21 nt, RNAi-antisense strand
ucgaacagacuguacuuccuu

SEQ ID NO: 14980 - DNA, 21 bp, Homo sapiens
gaagtacagtctgttcgagaa

SEQ ID NO: 14981 - RNA, 21 nt, RNAi-sense strand
aguacagucuguucgagaauu

SEQ ID NO: 14982 - RNA, 21 nt, RNAi-antisense strand
uucucgaacagacuguacuuu

SEQ ID NO: 14983 - DNA, 21 bp, Homo sapiens
gagaacaccttggtcatgaaa

SEQ ID NO: 14984 - RNA, 21 nt, RNAi-sense strand
gaacaccuuggucaugaaauu

SEQ ID NO: 14985 - RNA, 21 nt, RNAi-antisense strand
uuucaugaccaagguguucuu

SEQ ID NO: 14986 - DNA, 21 bp, Homo sapiens
gaacaccttggtcatgaaagt

SEQ ID NO: 14987 - RNA, 21 nt, RNAi-sense strand
acaccuuggucaugaaaguuu

SEQ ID NO: 14988 - RNA, 21 nt, RNAi-antisense strand
acuuucaugaccaagguguuu

SEQ ID NO: 14989 - DNA, 21 bp, Homo sapiens
gaaagtgacaacctgctgttt

SEQ ID NO: 14990 - RNA, 21 nt, RNAi-sense strand
aagugacaaccugcuguuuuu

SEQ ID NO: 14991 - RNA, 21 nt, RNAi-antisense strand
aaacagcagguugucacuuuu

SEQ ID NO: 14992 - DNA, 21 bp, Homo sapiens
gacaacctgctgtttgttcag

SEQ ID NO: 14993 - RNA, 21 nt, RNAi-sense strand
caaccugcuguuuguucaguu

SEQ ID NO: 14994 - RNA, 21 nt, RNAi-antisense strand
cugaacaaacagcagguuguu

SEQ ID NO: 14995 - DNA, 21 bp, Homo sapiens
gaagtcttctccttcagtgaa

SEQ ID NO: 14996 - RNA, 21 nt, RNAi-sense strand
agucuucuccuucagugaauu

SEQ ID NO: 14997 - RNA, 21 nt, RNAi-antisense strand
uucacugaaggagaagacuuu

SEQ ID NO: 14998 - DNA, 21 bp, Homo sapiens
gatatggaggacgacagcatg

SEQ ID NO: 14999 - RNA, 21 nt, RNAi-sense strand
uauggaggacgacagcauguu

SEQ ID NO: 15000 - RNA, 21 nt, RNAi-antisense strand
caugcugucguccuccauauu

SEQ ID NO: 15001 - DNA, 21 bp, Homo sapiens
gaggacgacagcatgtgcatc

SEQ ID NO: 15002 - RNA, 21 nt, RNAi-sense strand
ggacgacagcaugugcaucuu

SEQ ID NO: 15003 - RNA, 21 nt, RNAi-antisense strand
gaugcacaugcugucguccuu

SEQ ID NO: 15004 - DNA, 21 bp, Homo sapiens
gacgacagcatgtgcatcttc

SEQ ID NO: 15005 - RNA, 21 nt, RNAi-sense strand
cgacagcaugugcaucuucuu

SEQ ID NO: 15006 - RNA, 21 nt, RNAi-antisense strand
gaagaugcacaugcugucguu

SEQ ID NO: 15007 - DNA, 21 bp, Homo sapiens
gacagcatgtgcatcttctgt

SEQ ID NO: 15008 - RNA, 21 nt, RNAi-sense strand
cagcaugugcaucuucuguuu

SEQ ID NO: 15009 - RNA, 21 nt, RNAi-antisense strand
acagaagaugcacaugcuguu

SEQ ID NO: 15010 - DNA, 21 bp, Homo sapiens
gatgtagtttaactcaccgtt

SEQ ID NO: 15011 - RNA, 21 nt, RNAi-sense strand
uguaguuuaacucaccguuuu

SEQ ID NO: 15012 - RNA, 21 nt, RNAi-antisense strand
aacggugaguuaaacuacauu

SEQ ID NO: 15013 - DNA, 21 bp, Homo sapiens
gagcatgtggtcaggttgaac

SEQ ID NO: 15014 - RNA, 21 nt, RNAi-sense strand
gcauguggucagguugaacuu

SEQ ID NO: 15015 - RNA, 21 nt, RNAi-antisense strand
guucaaccugaccacaugcuu

SEQ ID NO: 15016 - DNA, 21 bp, Homo sapiens
gactccaagtttcctctcgaa

SEQ ID NO: 15017 - RNA, 21 nt, RNAi-sense strand
cuccaaguuuccucucgaauu

SEQ ID NO: 15018 - RNA, 21 nt, RNAi-antisense strand
uucgagaggaaacuuggaguu

SEQ ID NO: 15019 - DNA, 21 bp, Homo sapiens
gaagcctgcagtcactttagc

SEQ ID NO: 15020 - RNA, 21 nt, RNAi-sense strand
agccugcagucacuuuagcuu

SEQ ID NO: 15021 - RNA, 21 nt, RNAi-antisense strand
gcuaaagugacugcaggcuuu

SEQ ID NO: 15022 - DNA, 21 bp, Homo sapiens
gagaccacgactgtatcactc

SEQ ID NO: 15023 - RNA, 21 nt, RNAi-sense strand
gaccacgacuguaucacucuu

SEQ ID NO: 15024 - RNA, 21 nt, RNAi-antisense strand
gagugauacagucguggucuu

SEQ ID NO: 15025 - DNA, 21 bp, Homo sapiens
gaccacgactgtatcactcat

SEQ ID NO: 15026 - RNA, 21 nt, RNAi-sense strand
ccacgacuguaucacucauuu

SEQ ID NO: 15027 - RNA, 21 nt, RNAi-antisense strand
augagugauacagucgugguu

SEQ ID NO: 15028 - DNA, 21 bp, Homo sapiens
gactgtatcactcattgcttt

SEQ ID NO: 15029 - RNA, 21 nt, RNAi-sense strand
cuguaucacucauugcuuuuu

SEQ ID NO: 15030 - RNA, 21 nt, RNAi-antisense strand
aaagcaaugagugauacaguu

SEQ ID NO: 15031 - DNA, 21 bp, Homo sapiens
gaacactctccaggatctcat

SEQ ID NO: 15032 - RNA, 21 nt, RNAi-sense strand
acacucuccaggaucucauuu

SEQ ID NO: 15033 - RNA, 21 nt, RNAi-antisense strand
augagauccuggagaguguuu

SEQ ID NO: 15034 - DNA, 21 bp, Homo sapiens
gatctcattgactcagatgag

SEQ ID NO: 15035 - RNA, 21 nt, RNAi-sense strand
ucucauugacucagaugaguu

SEQ ID NO: 15036 - RNA, 21 nt, RNAi-antisense strand
cucaucugagucaaugagauu

SEQ ID NO: 15037 - DNA, 21 bp, Homo sapiens
gactcagatgagctgctggat

SEQ ID NO: 15038 - RNA, 21 nt, RNAi-sense strand
cucagaugagcugcuggauuu

SEQ ID NO: 15039 - RNA, 21 nt, RNAi-antisense strand
auccagcagcucaucugaguu

SEQ ID NO: 15040 - DNA, 21 bp, Homo sapiens
gatgagctgctggatccagaa

SEQ ID NO: 15041 - RNA, 21 nt, RNAi-sense strand
ugagcugcuggauccagaauu

SEQ ID NO: 15042 - RNA, 21 nt, RNAi-antisense strand
uucuggauccagcagcucauu

SEQ ID NO: 15043 - DNA, 21 bp, Homo sapiens
gagctgctggatccagaagat

SEQ ID NO: 15044 - RNA, 21 nt, RNAi-sense strand
gcugcuggauccagaagauuu

SEQ ID NO: 15045 - RNA, 21 nt, RNAi-antisense strand
aucuucuggauccagcagcuu

SEQ ID NO: 15046 - DNA, 21 bp, Homo sapiens
gatccagaagatttgaagaag

SEQ ID NO: 15047 - RNA, 21 nt, RNAi-sense strand
uccagaagauuugaagaaguu

SEQ ID NO: 15048 - RNA, 21 nt, RNAi-antisense strand
cuucuucaaaucuucuggauu

SEQ ID NO: 15049 - DNA, 21 bp, Homo sapiens
gaagatttgaagaagccagat

SEQ ID NO: 15050 - RNA, 21 nt, RNAi-sense strand
agauuugaagaagccagauuu

SEQ ID NO: 15051 - RNA, 21 nt, RNAi-antisense strand
aucuggcuucuucaaaucuuu

SEQ ID NO: 15052 - DNA, 21 bp, Homo sapiens
gatttgaagaagccagatcca

SEQ ID NO: 15053 - RNA, 21 nt, RNAi-sense strand
uuugaagaagccagauccauu

SEQ ID NO: 15054 - RNA, 21 nt, RNAi-antisense strand
uggaucuggcuucuucaaauu

SEQ ID NO: 15055 - DNA, 21 bp, Homo sapiens
gaagaagccagatccagcttc

SEQ ID NO: 15056 - RNA, 21 nt, RNAi-sense strand
agaagccagauccagcuucuu

SEQ ID NO: 15057 - RNA, 21 nt, RNAi-antisense strand
gaagcuggaucuggcuucuuu

SEQ ID NO: 15058 - DNA, 21 bp, Homo sapiens
gaggaaggcctgtaagaactg

SEQ ID NO: 15059 - RNA, 21 nt, RNAi-sense strand
ggaaggccuguaagaacuguu

SEQ ID NO: 15060 - RNA, 21 nt, RNAi-antisense strand
caguucuuacaggccuuccuu

SEQ ID NO: 15061 - DNA, 21 bp, Homo sapiens
gaaggcctgtaagaactgcac

SEQ ID NO: 15062 - RNA, 21 nt, RNAi-sense strand
aggccuguaagaacugcacuu

SEQ ID NO: 15063 - RNA, 21 nt, RNAi-antisense strand
gugcaguucuuacaggccuuu

SEQ ID NO: 15064 - DNA, 21 bp, Homo sapiens
gaactgcacctgtggccttgc

SEQ ID NO: 15065 - RNA, 21 nt, RNAi-sense strand
acugcaccuguggccuugcuu

SEQ ID NO: 15066 - RNA, 21 nt, RNAi-antisense strand
gcaaggccacaggugcaguuu

SEQ ID NO: 15067 - DNA, 21 bp, Homo sapiens
gatgccagccttcaaacctgg

SEQ ID NO: 15068 - RNA, 21 nt, RNAi-sense strand
ugccagccuucaaaccugguu

SEQ ID NO: 15069 - RNA, 21 nt, RNAi-antisense strand
ccagguuugaaggcuggcauu

SEQ ID NO: 15070 - DNA, 21 bp, Homo sapiens
gagtgatagcaatcttcatga

SEQ ID NO: 15071 - RNA, 21 nt, RNAi-sense strand
gugauagcaaucuucaugauu

SEQ ID NO: 15072 - RNA, 21 nt, RNAi-antisense strand
ucaugaagauugcuaucacuu

SEQ ID NO: 15073 - DNA, 21 bp, Homo sapiens
gatagcaatcttcatgatgcc

SEQ ID NO: 15074 - RNA, 21 nt, RNAi-sense strand
uagcaaucuucaugaugccuu

SEQ ID NO: 15075 - RNA, 21 nt, RNAi-antisense strand
ggcaucaugaagauugcuauu

SEQ ID NO: 15076 - DNA, 21 bp, Homo sapiens
gatgcctaggaggttcctgac

SEQ ID NO: 15077 - RNA, 21 nt, RNAi-sense strand
ugccuaggagguuccugacuu

SEQ ID NO: 15078 - RNA, 21 nt, RNAi-antisense strand
gucaggaaccuccuaggcauu

SEQ ID NO: 15079 - DNA, 21 bp, Homo sapiens
gatttgttcactctgagatct

SEQ ID NO: 15080 - RNA, 21 nt, RNAi-sense strand
uuuguucacucugagaucuuu

SEQ ID NO: 15081 - RNA, 21 nt, RNAi-antisense strand
agaucucagagugaacaaauu

SEQ ID NO: 15082 - DNA, 21 bp, Homo sapiens
gagcattaacactctgtgaca

SEQ ID NO: 15083 - RNA, 21 nt, RNAi-sense strand
gcauuaacacucugugacauu

SEQ ID NO: 15084 - RNA, 21 nt, RNAi-antisense strand
ugucacagaguguuaaugcuu

SEQ ID NO: 15085 - DNA, 21 bp, Homo sapiens
gagtctcatctcagcaatgct

SEQ ID NO: 15086 - RNA, 21 nt, RNAi-sense strand
gucucaucucagcaaugcuuu

SEQ ID NO: 15087 - RNA, 21 nt, RNAi-antisense strand
agcauugcugagaugagacuu

SEQ ID NO: 15088 - DNA, 21 bp, Homo sapiens
gagttgttagtttactccatt

SEQ ID NO: 15089 - RNA, 21 nt, RNAi-sense strand
guuguuaguuuacuccauuuu

SEQ ID NO: 15090 - RNA, 21 nt, RNAi-antisense strand
aauggaguaaacuaacaacuu

SEQ ID NO: 15091 - DNA, 21 bp, Homo sapiens
gacacgagtcaagtggctcac

SEQ ID NO: 15092 - RNA, 21 nt, RNAi-sense strand
cacgagucaaguggcucacuu

SEQ ID NO: 15093 - RNA, 21 nt, RNAi-antisense strand
gugagccacuugacucguguu

SEQ ID NO: 15094 - DNA, 21 bp, Homo sapiens
gagtcaagtggctcacaacct

SEQ ID NO: 15095 - RNA, 21 nt, RNAi-sense strand
gucaaguggcucacaaccuuu

SEQ ID NO: 15096 - RNA, 21 nt, RNAi-antisense strand
agguugugagccacuugacuu

SEQ ID NO: 15097 - DNA, 21 bp, Homo sapiens
gaggactcactcactggttgc

SEQ ID NO: 15098 - RNA, 21 nt, RNAi-sense strand
ggacucacucacugguugcuu

SEQ ID NO: 15099 - RNA, 21 nt, RNAi-antisense strand
gcaaccagugagugaguccuu

SEQ ID NO: 15100 - DNA, 21 bp, Homo sapiens
gactcactcactggttgctgt

SEQ ID NO: 15101 - RNA, 21 nt, RNAi-sense strand
cucacucacugguugcuguuu

SEQ ID NO: 15102 - RNA, 21 nt, RNAi-antisense strand
acagcaaccagugagugaguu

SEQ ID NO: 15103 - DNA, 21 bp, Homo sapiens
gactgtagcattgcatctgtg

SEQ ID NO: 15104 - RNA, 21 nt, RNAi-sense strand
cuguagcauugcaucuguguu

SEQ ID NO: 15105 - RNA, 21 nt, RNAi-antisense strand
cacagaugcaaugcuacaguu

SEQ ID NO: 15106 - DNA, 21 bp, Homo sapiens
gacatatcttgagattctgca

SEQ ID NO: 15107 - RNA, 21 nt, RNAi-sense strand
cauaucuugagauucugcauu

SEQ ID NO: 15108 - RNA, 21 nt, RNAi-antisense strand
ugcagaaucucaagauauguu

SEQ ID NO: 15109 - DNA, 21 bp, Homo sapiens
gagattctgcatgtcttgtaa

SEQ ID NO: 15110 - RNA, 21 nt, RNAi-sense strand
gauucugcaugucuuguaauu

SEQ ID NO: 15111 - RNA, 21 nt, RNAi-antisense strand
uuacaagacaugcagaaucuu

SEQ ID NO: 15112 - DNA, 21 bp, Homo sapiens
gattctgcatgtcttgtaaag

SEQ ID NO: 15113 - RNA, 21 nt, RNAi-sense strand
uucugcaugucuuguaaaguu

SEQ ID NO: 15114 - RNA, 21 nt, RNAi-antisense strand
cuuuacaagacaugcagaauu

SEQ ID NO: 15115 - DNA, 21 bp, Homo sapiens
gatgtgcatttgtgtgtgatg

SEQ ID NO: 15116 - RNA, 21 nt, RNAi-sense strand
ugugcauuugugugugauguu

SEQ ID NO: 15117 - RNA, 21 nt, RNAi-antisense strand
caucacacacaaaugcacauu

SEQ ID NO: 15118 - DNA, 21 bp, Homo sapiens
gatgttggatagtcatccacg

SEQ ID NO: 15119 - RNA, 21 nt, RNAi-sense strand
uguuggauagucauccacguu

SEQ ID NO: 15120 - RNA, 21 nt, RNAi-antisense strand
cguggaugacuauccaacauu

SEQ ID NO: 15121 - DNA, 21 bp, Homo sapiens
gatagtcatccacgctcagtt

SEQ ID NO: 15122 - RNA, 21 nt, RNAi-sense strand
uagucauccacgcucaguuuu

SEQ ID NO: 15123 - RNA, 21 nt, RNAi-antisense strand
aacugagcguggaugacuauu

SEQ ID NO: 15124 - DNA, 21 bp, Homo sapiens
gaccattggaggaacttagtg

SEQ ID NO: 15125 - RNA, 21 nt, RNAi-sense strand
ccauuggaggaacuuaguguu

SEQ ID NO: 15126 - RNA, 21 nt, RNAi-antisense strand
cacuaaguuccuccaaugguu

SEQ ID NO: 15127 - DNA, 21 bp, Homo sapiens
gaggaacttagtgtcacgcac

SEQ ID NO: 15128 - RNA, 21 nt, RNAi-sense strand
ggaacuuagugucacgcacuu

SEQ ID NO: 15129 - RNA, 21 nt, RNAi-antisense strand
gugcgugacacuaaguuccuu

SEQ ID NO: 15130 - DNA, 21 bp, Homo sapiens
gaacttagtgtcacgcacaaa

SEQ ID NO: 15131 - RNA, 21 nt, RNAi-sense strand
acuuagugucacgcacaaauu

SEQ ID NO: 15132 - RNA, 21 nt, RNAi-antisense strand
uuugugcgugacacuaaguuu

SEQ ID NO: 15133 - DNA, 21 bp, Homo sapiens
gaagagtccaggttggtgagc

SEQ ID NO: 15134 - RNA, 21 nt, RNAi-sense strand
agaguccagguuggugagcuu

SEQ ID NO: 15135 - RNA, 21 nt, RNAi-antisense strand
gcucaccaaccuggacucuuu

SEQ ID NO: 15136 - DNA, 21 bp, Homo sapiens
gagtccaggttggtgagcatt

SEQ ID NO: 15137 - RNA, 21 nt, RNAi-sense strand
guccagguuggugagcauuuu

SEQ ID NO: 15138 - RNA, 21 nt, RNAi-antisense strand
aaugcucaccaaccuggacuu

SEQ ID NO: 15139 - DNA, 21 bp, Homo sapiens
gaactctgaacgacaatacgt

SEQ ID NO: 15140 - RNA, 21 nt, RNAi-sense strand
acucugaacgacaauacguuu

SEQ ID NO: 15141 - RNA, 21 nt, RNAi-antisense strand
acguauugucguucagaguuu

SEQ ID NO: 15142 - DNA, 21 bp, Homo sapiens
gaacgacaatacgtctctctg

SEQ ID NO: 15143 - RNA, 21 nt, RNAi-sense strand
acgacaauacgucucucuguu

SEQ ID NO: 15144 - RNA, 21 nt, RNAi-antisense strand
cagagagacguauugucguuu

SEQ ID NO: 15145 - DNA, 21 bp, Homo sapiens
gacaatacgtctctctgagca

SEQ ID NO: 15146 - RNA, 21 nt, RNAi-sense strand
caauacgucucucugagcauu

SEQ ID NO: 15147 - RNA, 21 nt, RNAi-antisense strand
ugcucagagagacguauuguu

SEQ ID NO: 15148 - DNA, 21 bp, Homo sapiens
gacttggaatcaatcttgcca

SEQ ID NO: 15149 - RNA, 21 nt, RNAi-sense strand
cuuggaaucaaucuugccauu

SEQ ID NO: 15150 - RNA, 21 nt, RNAi-antisense strand
uggcaagauugauuccaaguu

SEQ ID NO: 15151 - DNA, 21 bp, Homo sapiens
gagagattgtgtggatttaag

SEQ ID NO: 15152 - RNA, 21 nt, RNAi-sense strand
gagauuguguggauuuaaguu

SEQ ID NO: 15153 - RNA, 21 nt, RNAi-antisense strand
cuuaaauccacacaaucucuu

SEQ ID NO: 15154 - DNA, 21 bp, Homo sapiens
gagattgtgtggatttaagag

SEQ ID NO: 15155 - RNA, 21 nt, RNAi-sense strand
gauuguguggauuuaagaguu

SEQ ID NO: 15156 - RNA, 21 nt, RNAi-antisense strand
cucuuaaauccacacaaucuu

SEQ ID NO: 15157 - DNA, 21 bp, Homo sapiens
gattgtgtggatttaagagac

SEQ ID NO: 15158 - RNA, 21 nt, RNAi-sense strand
uuguguggauuuaagagacuu

SEQ ID NO: 15159 - RNA, 21 nt, RNAi-antisense strand
gucucuuaaauccacacaauu

SEQ ID NO: 15160 - DNA, 21 bp, Homo sapiens
taagcttcaagcgttaaccgg

SEQ ID NO: 15161 - RNA, 21 nt, RNAi-sense strand
agcuucaagcguuaaccgguu

SEQ ID NO: 15162 - RNA, 21 nt, RNAi-antisense strand
ccgguuaacgcuugaagcuuu

SEQ ID NO: 15163 - DNA, 21 bp, Homo sapiens
tagagacagctgtagataaca

SEQ ID NO: 15164 - RNA, 21 nt, RNAi-sense strand
gagacagcuguagauaacauu

SEQ ID NO: 15165 - RNA, 21 nt, RNAi-antisense strand
uguuaucuacagcugucucuu

SEQ ID NO: 15166 - DNA, 21 bp, Homo sapiens
taacaatagcaaagtgaagac

SEQ ID NO: 15167 - RNA, 21 nt, RNAi-sense strand
acaauagcaaagugaagacuu

SEQ ID NO: 15168 - RNA, 21 nt, RNAi-antisense strand
gucuucacuuugcuauuguuu

SEQ ID NO: 15169 - DNA, 21 bp, Homo sapiens
tagcaaagtgaagacagcatc

SEQ ID NO: 15170 - RNA, 21 nt, RNAi-sense strand
gcaaagugaagacagcaucuu

SEQ ID NO: 15171 - RNA, 21 nt, RNAi-antisense strand
gaugcugucuucacuuugcuu

SEQ ID NO: 15172 - DNA, 21 bp, Homo sapiens
tacagtctgttcgagaacacc

SEQ ID NO: 15173 - RNA, 21 nt, RNAi-sense strand
cagucuguucgagaacaccuu

SEQ ID NO: 15174 - RNA, 21 nt, RNAi-antisense strand
gguguucucgaacagacuguu

SEQ ID NO: 15175 - DNA, 21 bp, Homo sapiens
taggcagcttaagctttccat

SEQ ID NO: 15176 - RNA, 21 nt, RNAi-sense strand
ggcagcuuaagcuuuccauuu

SEQ ID NO: 15177 - RNA, 21 nt, RNAi-antisense strand
auggaaagcuuaagcugccuu

SEQ ID NO: 15178 - DNA, 21 bp, Homo sapiens
taagctttccatcaccaagaa

SEQ ID NO: 15179 - RNA, 21 nt, RNAi-sense strand
agcuuuccaucaccaagaauu

SEQ ID NO: 15180 - RNA, 21 nt, RNAi-antisense strand
uucuuggugauggaaagcuuu

SEQ ID NO: 15181 - DNA, 21 bp, Homo sapiens
tatggaggacgacagcatgtg

SEQ ID NO: 15182 - RNA, 21 nt, RNAi-sense strand
uggaggacgacagcauguguu

SEQ ID NO: 15183 - RNA, 21 nt, RNAi-antisense strand
cacaugcugucguccuccauu

SEQ ID NO: 15184 - DNA, 21 bp, Homo sapiens
tagtttaactcaccgttggcc

SEQ ID NO: 15185 - RNA, 21 nt, RNAi-sense strand
guuuaacucaccguuggccuu

SEQ ID NO: 15186 - RNA, 21 nt, RNAi-antisense strand
ggccaacggugaguuaaacuu

SEQ ID NO: 15187 - DNA, 21 bp, Homo sapiens
taactcaccgttggcctcttg

SEQ ID NO: 15188 - RNA, 21 nt, RNAi-sense strand
acucaccguuggccucuuguu

SEQ ID NO: 15189 - RNA, 21 nt, RNAi-antisense strand
caagaggccaacggugaguuu

SEQ ID NO: 15190 - DNA, 21 bp, Homo sapiens
tagcagagaccacgactgtat

SEQ ID NO: 15191 - RNA, 21 nt, RNAi-sense strand
gcagagaccacgacuguauuu

SEQ ID NO: 15192 - RNA, 21 nt, RNAi-antisense strand
auacagucguggucucugcuu

SEQ ID NO: 15193 - DNA, 21 bp, Homo sapiens
tatcactcattgctttgaaca

SEQ ID NO: 15194 - RNA, 21 nt, RNAi-sense strand
ucacucauugcuuugaacauu

SEQ ID NO: 15195 - RNA, 21 nt, RNAi-antisense strand
uguucaaagcaaugagugauu

SEQ ID NO: 15196 - DNA, 21 bp, Homo sapiens
taagaactgcacctgtggcct

SEQ ID NO: 15197 - RNA, 21 nt, RNAi-sense strand
agaacugcaccuguggccuuu

SEQ ID NO: 15198 - RNA, 21 nt, RNAi-antisense strand
aggccacaggugcaguucuuu

SEQ ID NO: 15199 - DNA, 21 bp, Homo sapiens
tagcaatcttcatgatgccta

SEQ ID NO: 15200 - RNA, 21 nt, RNAi-sense strand
gcaaucuucaugaugccuauu

SEQ ID NO: 15201 - RNA, 21 nt, RNAi-antisense strand
uaggcaucaugaagauugcuu

SEQ ID NO: 15202 - DNA, 21 bp, Homo sapiens
tagcagacagagtgaagctgg

SEQ ID NO: 15203 - RNA, 21 nt, RNAi-sense strand
gcagacagagugaagcugguu

SEQ ID NO: 15204 - RNA, 21 nt, RNAi-antisense strand
ccagcuucacucugucugcuu

SEQ ID NO: 15205 - DNA, 21 bp, Homo sapiens
taacactctgtgacagagctg

SEQ ID NO: 15206 - RNA, 21 nt, RNAi-sense strand
acacucugugacagagcuguu

SEQ ID NO: 15207 - RNA, 21 nt, RNAi-antisense strand
cagcucugucacagaguguuu

SEQ ID NO: 15208 - DNA, 21 bp, Homo sapiens
tagtttactccattctttgtg

SEQ ID NO: 15209 - RNA, 21 nt, RNAi-sense strand
guuuacuccauucuuuguguu

SEQ ID NO: 15210 - RNA, 21 nt, RNAi-antisense strand
cacaaagaauggaguaaacuu

SEQ ID NO: 15211 - DNA, 21 bp, Homo sapiens
tactccattctttgtgacacg

SEQ ID NO: 15212 - RNA, 21 nt, RNAi-sense strand
cuccauucuuugugacacguu

SEQ ID NO: 15213 - RNA, 21 nt, RNAi-antisense strand
cgugucacaaagaauggaguu

SEQ ID NO: 15214 - DNA, 21 bp, Homo sapiens
tagcattgcatctgtgtcctg

SEQ ID NO: 15215 - RNA, 21 nt, RNAi-sense strand
gcauugcaucuguguccuguu

SEQ ID NO: 15216 - RNA, 21 nt, RNAi-antisense strand
caggacacagaugcaaugcuu

SEQ ID NO: 15217 - DNA, 21 bp, Homo sapiens
taaacttgctgcatatcttga

SEQ ID NO: 15218 - RNA, 21 nt, RNAi-sense strand
aacuugcugcauaucuugauu

SEQ ID NO: 15219 - RNA, 21 nt, RNAi-antisense strand
ucaagauaugcagcaaguuuu

SEQ ID NO: 15220 - DNA, 21 bp, Homo sapiens
tatcttgagattctgcatgtc

SEQ ID NO: 15221 - RNA, 21 nt, RNAi-sense strand
ucuugagauucugcaugucuu

SEQ ID NO: 15222 - RNA, 21 nt, RNAi-antisense strand
gacaugcagaaucucaagauu

SEQ ID NO: 15223 - DNA, 21 bp, Homo sapiens
tagtcatccacgctcagtttg

SEQ ID NO: 15224 - RNA, 21 nt, RNAi-sense strand
gucauccacgcucaguuuguu

SEQ ID NO: 15225 - RNA, 21 nt, RNAi-antisense strand
caaacugagcguggaugacuu

SEQ ID NO: 15226 - DNA, 21 bp, Homo sapiens
tattcctacgcttagaatagg

SEQ ID NO: 15227 - RNA, 21 nt, RNAi-sense strand
uuccuacgcuuagaauagguu

SEQ ID NO: 15228 - RNA, 21 nt, RNAi-antisense strand
ccuauucuaagcguaggaauu

SEQ ID NO: 15229 - DNA, 21 bp, Homo sapiens
tagaagagtccaggttggtga

SEQ ID NO: 15230 - RNA, 21 nt, RNAi-sense strand
gaagaguccagguuggugauu

SEQ ID NO: 15231 - RNA, 21 nt, RNAi-antisense strand
ucaccaaccuggacucuucuu

SEQ ID NO: 15232 - DNA, 21 bp, Homo sapiens
tacgtctctctgagcagagac

SEQ ID NO: 15233 - RNA, 21 nt, RNAi-sense strand
cgucucucugagcagagacuu

SEQ ID NO: 15234 - RNA, 21 nt, RNAi-antisense strand
gucucugcucagagagacguu

SEQ ID NO: 15235 - DNA, 21 bp, Homo sapiens
tatggacttggaatcaatctt

SEQ ID NO: 15236 - RNA, 21 nt, RNAi-sense strand
uggacuuggaaucaaucuuuu

SEQ ID NO: 15237 - RNA, 21 nt, RNAi-antisense strand
aagauugauuccaaguccauu

SEQ ID NO: 15238 - DNA, 21 bp, Homo sapiens
tatttggagagattgtgtgga

SEQ ID NO: 15239 - RNA, 21 nt, RNAi-sense strand
uuuggagagauuguguggauu

SEQ ID NO: 15240 - RNA, 21 nt, RNAi-antisense strand
uccacacaaucucuccaaauu

SEQ ID NO: 15241 - DNA, 21 bp, Homo sapiens
aagcctgcagtcactttagct

SEQ ID NO: 15242 - RNA, 21 nt, RNAi-sense strand
gccugcagucacuuuagcuuu

SEQ ID NO: 15243 - RNA, 21 nt, RNAi-antisense strand
agcuaaagugacugcaggcuu

SEQ ID NO: 15244 - DNA, 21 bp, Homo sapiens
caagtttcctctcgaagcctg

SEQ ID NO: 15245 - RNA, 21 nt, RNAi-sense strand
aguuuccucucgaagccuguu

SEQ ID NO: 15246 - RNA, 21 nt, RNAi-antisense strand
caggcuucgagaggaaacuuu

SEQ ID NO: 15247 - DNA, 21 bp, Homo sapiens
cattagcagagaccacgactg

SEQ ID NO: 15248 - RNA, 21 nt, RNAi-sense strand
uuagcagagaccacgacuguu

SEQ ID NO: 15249 - RNA, 21 nt, RNAi-antisense strand
cagucguggucucugcuaauu

SEQ ID NO: 15250 - DNA, 21 bp, Homo sapiens
cagagaccacgactgtatcac

SEQ ID NO: 15251 - RNA, 21 nt, RNAi-sense strand
gagaccacgacuguaucacuu

SEQ ID NO: 15252 - RNA, 21 nt, RNAi-antisense strand
gugauacagucguggucucuu

SEQ ID NO: 15253 - DNA, 21 bp, Homo sapiens
gactgtatcactcattgcttt

SEQ ID NO: 15254 - RNA, 21 nt, RNAi-sense strand
cuguaucacucauugcuuuuu

SEQ ID NO: 15255 - RNA, 21 nt, RNAi-antisense strand
aaagcaaugagugauacaguu

SEQ ID NO: 15256 - DNA, 21 bp, Homo sapiens
tagcagagaccacgactgtat

SEQ ID NO: 15257 - RNA, 21 nt, RNAi-sense strand
gcagagaccacgacuguauuu

SEQ ID NO: 15258 - RNA, 21 nt, RNAi-antisense strand
auacagucguggucucugcuu

SEQ ID NO: 15259 - DNA, 21 bp, Homo sapiens
aaaggcgtgcaggtgttggcc

SEQ ID NO: 15260 - RNA, 21 nt, RNAi-sense strand
aggcgugcagguguuggccuu

SEQ ID NO: 15261 - RNA, 21 nt, RNAi-antisense strand
ggccaacaccugcacgccuuu

SEQ ID NO: 15262 - DNA, 21 bp, Homo sapiens
aagccatgaagcatatggagc

SEQ ID NO: 15263 - RNA, 21 nt, RNAi-sense strand
gccaugaagcauauggagcuu

SEQ ID NO: 15264 - RNA, 21 nt, RNAi-antisense strand
gcuccauaugcuucauggcuu

SEQ ID NO: 15265 - DNA, 21 bp, Homo sapiens
aagcatatggagcctcaagta

SEQ ID NO: 15266 - RNA, 21 nt, RNAi-sense strand
gcauauggagccucaaguauu

SEQ ID NO: 15267 - RNA, 21 nt, RNAi-antisense strand
uacuugaggcuccauaugcuu

SEQ ID NO: 15268 - DNA, 21 bp, Homo sapiens
aaatctgccttcagtggtggc

SEQ ID NO: 15269 - RNA, 21 nt, RNAi-sense strand
aucugccuucagugguggcuu

SEQ ID NO: 15270 - RNA, 21 nt, RNAi-antisense strand
gccaccacugaaggcagauuu

SEQ ID NO: 15271 - DNA, 21 bp, Homo sapiens
aatctgccttcagtggtggct

SEQ ID NO: 15272 - RNA, 21 nt, RNAi-sense strand
ucugccuucagugguggcuuu

SEQ ID NO: 15273 - RNA, 21 nt, RNAi-antisense strand
agccaccacugaaggcagauu

SEQ ID NO: 15274 - DNA, 21 bp, Homo sapiens
aagcagcattaatactaggtg

SEQ ID NO: 15275 - RNA, 21 nt, RNAi-sense strand
gcagcauuaauacuagguguu

SEQ ID NO: 15276 - RNA, 21 nt, RNAi-antisense strand
caccuaguauuaaugcugcuu

SEQ ID NO: 15277 - DNA, 21 bp, Homo sapiens
aaataagagatgctcatcgac

SEQ ID NO: 15278 - RNA, 21 nt, RNAi-sense strand
auaagagaugcucaucgacuu

SEQ ID NO: 15279 - RNA, 21 nt, RNAi-antisense strand
gucgaugagcaucucuuauuu

SEQ ID NO: 15280 - DNA, 21 bp, Homo sapiens
aataagagatgctcatcgacg

SEQ ID NO: 15281 - RNA, 21 nt, RNAi-sense strand
uaagagaugcucaucgacguu

SEQ ID NO: 15282 - RNA, 21 nt, RNAi-antisense strand
cgucgaugagcaucucuuauu

SEQ ID NO: 15283 - DNA, 21 bp, Homo sapiens
aagagatgctcatcgacgaat

SEQ ID NO: 15284 - RNA, 21 nt, RNAi-sense strand
gagaugcucaucgacgaauuu

SEQ ID NO: 15285 - RNA, 21 nt, RNAi-antisense strand
auucgucgaugagcaucucuu

SEQ ID NO: 15286 - DNA, 21 bp, Homo sapiens
aaatcatcctgacaaaggagg

SEQ ID NO: 15287 - RNA, 21 nt, RNAi-sense strand
aucauccugacaaaggagguu

SEQ ID NO: 15288 - RNA, 21 nt, RNAi-antisense strand
ccuccuuugucaggaugauuu

SEQ ID NO: 15289 - DNA, 21 bp, Homo sapiens
aatcatcctgacaaaggagga

SEQ ID NO: 15290 - RNA, 21 nt, RNAi-sense strand
ucauccugacaaaggaggauu

SEQ ID NO: 15291 - RNA, 21 nt, RNAi-antisense strand
uccuccuuugucaggaugauu

SEQ ID NO: 15292 - DNA, 21 bp, Homo sapiens
aaaggaggatctccttatata

SEQ ID NO: 15293 - RNA, 21 nt, RNAi-sense strand
aggaggaucuccuuauauauu

SEQ ID NO: 15294 - RNA, 21 nt, RNAi-antisense strand
uauauaaggagauccuccuuu

SEQ ID NO: 15295 - DNA, 21 bp, Homo sapiens
aaggaggatctccttatatag

SEQ ID NO: 15296 - RNA, 21 nt, RNAi-sense strand
ggaggaucuccuuauauaguu

SEQ ID NO: 15297 - RNA, 21 nt, RNAi-antisense strand
cuauauaaggagauccuccuu

SEQ ID NO: 15298 - DNA, 21 bp, Homo sapiens
aagatttactagaaggtcaag

SEQ ID NO: 15299 - RNA, 21 nt, RNAi-sense strand
gauuuacuagaaggucaaguu

SEQ ID NO: 15300 - RNA, 21 nt, RNAi-antisense strand
cuugaccuucuaguaaaucuu

SEQ ID NO: 15301 - DNA, 21 bp, Homo sapiens
aaatgcctcagagctacaatt

SEQ ID NO: 15302 - RNA, 21 nt, RNAi-sense strand
augccucagagcuacaauuuu

SEQ ID NO: 15303 - RNA, 21 nt, RNAi-antisense strand
aauuguagcucugaggcauuu

SEQ ID NO: 15304 - DNA, 21 bp, Homo sapiens
aatgcctcagagctacaattt

SEQ ID NO: 15305 - RNA, 21 nt, RNAi-sense strand
ugccucagagcuacaauuuuu

SEQ ID NO: 15306 - RNA, 21 nt, RNAi-antisense strand
aaauuguagcucugaggcauu

SEQ ID NO: 15307 - DNA, 21 bp, Homo sapiens
aagctaaatctcaaagccttg

SEQ ID NO: 15308 - RNA, 21 nt, RNAi-sense strand
gcuaaaucucaaagccuuguu

SEQ ID NO: 15309 - RNA, 21 nt, RNAi-antisense strand
caaggcuuugagauuuagcuu

SEQ ID NO: 15310 - DNA, 21 bp, Homo sapiens
aaatctcaaagccttggtata

SEQ ID NO: 15311 - RNA, 21 nt, RNAi-sense strand
aucucaaagccuugguauauu

SEQ ID NO: 15312 - RNA, 21 nt, RNAi-antisense strand
uauaccaaggcuuugagauuu

SEQ ID NO: 15313 - DNA, 21 bp, Homo sapiens
aatctcaaagccttggtataa

SEQ ID NO: 15314 - RNA, 21 nt, RNAi-sense strand
ucucaaagccuugguauaauu

SEQ ID NO: 15315 - RNA, 21 nt, RNAi-antisense strand
uuauaccaaggcuuugagauu

SEQ ID NO: 15316 - DNA, 21 bp, Homo sapiens
aagcacacaccttctgaatag

SEQ ID NO: 15317 - RNA, 21 nt, RNAi-sense strand
gcacacaccuucugaauaguu

SEQ ID NO: 15318 - RNA, 21 nt, RNAi-antisense strand
cuauucagaaggugugugcuu

SEQ ID NO: 15319 - DNA, 21 bp, Homo sapiens
aaggcaaagtgaagatgacag

SEQ ID NO: 15320 - RNA, 21 nt, RNAi-sense strand
ggcaaagugaagaugacaguu

SEQ ID NO: 15321 - RNA, 21 nt, RNAi-antisense strand
cugucaucuucacuuugccuu

SEQ ID NO: 15322 - DNA, 21 bp, Homo sapiens
aaagtgaagatgacagtcctt

SEQ ID NO: 15323 - RNA, 21 nt, RNAi-sense strand
agugaagaugacaguccuuuu

SEQ ID NO: 15324 - RNA, 21 nt, RNAi-antisense strand
aaggacugucaucuucacuuu

SEQ ID NO: 15325 - DNA, 21 bp, Homo sapiens
aagtgaagatgacagtccttg

SEQ ID NO: 15326 - RNA, 21 nt, RNAi-sense strand
gugaagaugacaguccuuguu

SEQ ID NO: 15327 - RNA, 21 nt, RNAi-antisense strand
caaggacugucaucuucacuu

SEQ ID NO: 15328 - DNA, 21 bp, Homo sapiens
aagatgacagtccttgctctc

SEQ ID NO: 15329 - RNA, 21 nt, RNAi-sense strand
gaugacaguccuugcucucuu

SEQ ID NO: 15330 - RNA, 21 nt, RNAi-antisense strand
gagagcaaggacugucaucuu

SEQ ID NO: 15331 - DNA, 21 bp, Homo sapiens
aaactggtaattagactgtga

SEQ ID NO: 15332 - RNA, 21 nt, RNAi-sense strand
acugguaauuagacugugauu

SEQ ID NO: 15333 - RNA, 21 nt, RNAi-antisense strand
ucacagucuaauuaccaguuu

SEQ ID NO: 15334 - DNA, 21 bp, Homo sapiens
aactggtaattagactgtgat

SEQ ID NO: 15335 - RNA, 21 nt, RNAi-sense strand
cugguaauuagacugugauuu

SEQ ID NO: 15336 - RNA, 21 nt, RNAi-antisense strand
aucacagucuaauuaccaguu

SEQ ID NO: 15337 - DNA, 21 bp, Homo sapiens
aaaggctgttccaggtacagg

SEQ ID NO: 15338 - RNA, 21 nt, RNAi-sense strand
aggcuguuccagguacagguu

SEQ ID NO: 15339 - RNA, 21 nt, RNAi-antisense strand
ccuguaccuggaacagccuuu

SEQ ID NO: 15340 - DNA, 21 bp, Homo sapiens
aaggctgttccaggtacaggc

SEQ ID NO: 15341 - RNA, 21 nt, RNAi-sense strand
ggcuguuccagguacaggcuu

SEQ ID NO: 15342 - RNA, 21 nt, RNAi-antisense strand
gccuguaccuggaacagccuu

SEQ ID NO: 15343 - DNA, 21 bp, Homo sapiens
aactggcctggcaacttggat

SEQ ID NO: 15344 - RNA, 21 nt, RNAi-sense strand
cuggccuggcaacuuggauuu

SEQ ID NO: 15345 - RNA, 21 nt, RNAi-antisense strand
auccaaguugccaggccaguu

SEQ ID NO: 15346 - DNA, 21 bp, Homo sapiens
aacttggatacttggaacctt

SEQ ID NO: 15347 - RNA, 21 nt, RNAi-sense strand
cuuggauacuuggaaccuuuu

SEQ ID NO: 15348 - RNA, 21 nt, RNAi-antisense strand
aagguuccaaguauccaaguu

SEQ ID NO: 15349 - DNA, 21 bp, Homo sapiens
aagtgaatttaaccacaactg

SEQ ID NO: 15350 - RNA, 21 nt, RNAi-sense strand
gugaauuuaaccacaacuguu

SEQ ID NO: 15351 - RNA, 21 nt, RNAi-antisense strand
caguugugguuaaauucacuu

SEQ ID NO: 15352 - DNA, 21 bp, Homo sapiens
aatttaaccacaactgagacc

SEQ ID NO: 15353 - RNA, 21 nt, RNAi-sense strand
uuuaaccacaacugagaccuu

SEQ ID NO: 15354 - RNA, 21 nt, RNAi-antisense strand
ggucucaguugugguuaaauu

SEQ ID NO: 15355 - DNA, 21 bp, Homo sapiens
aaccacaactgagacctaaga

SEQ ID NO: 15356 - RNA, 21 nt, RNAi-sense strand
ccacaacugagaccuaagauu

SEQ ID NO: 15357 - RNA, 21 nt, RNAi-antisense strand
ucuuaggucucaguugugguu

SEQ ID NO: 15358 - DNA, 21 bp, Homo sapiens
aactgagacctaagaaattga

SEQ ID NO: 15359 - RNA, 21 nt, RNAi-sense strand
cugagaccuaagaaauugauu

SEQ ID NO: 15360 - RNA, 21 nt, RNAi-antisense strand
ucaauuucuuaggucucaguu

SEQ ID NO: 15361 - DNA, 21 bp, Homo sapiens
aaagatttcagagtacaggtc

SEQ ID NO: 15362 - RNA, 21 nt, RNAi-sense strand
agauuucagaguacaggucuu

SEQ ID NO: 15363 - RNA, 21 nt, RNAi-antisense strand
gaccuguacucugaaaucuuu

SEQ ID NO: 15364 - DNA, 21 bp, Homo sapiens
aagatttcagagtacaggtct

SEQ ID NO: 15365 - RNA, 21 nt, RNAi-sense strand
gauuucagaguacaggucuuu

SEQ ID NO: 15366 - RNA, 21 nt, RNAi-antisense strand
agaccuguacucugaaaucuu

SEQ ID NO: 15367 - DNA, 21 bp, Homo sapiens
aatcacagttcattgcagcct

SEQ ID NO: 15368 - RNA, 21 nt, RNAi-sense strand
ucacaguucauugcagccuuu

SEQ ID NO: 15369 - RNA, 21 nt, RNAi-antisense strand
aggcugcaaugaacugugauu

SEQ ID NO: 15370 - DNA, 21 bp, Homo sapiens
aaattattccttcagttggct

SEQ ID NO: 15371 - RNA, 21 nt, RNAi-sense strand
auuauuccuucaguuggcuuu

SEQ ID NO: 15372 - RNA, 21 nt, RNAi-antisense strand
agccaacugaaggaauaauuu

SEQ ID NO: 15373 - DNA, 21 bp, Homo sapiens
aattattccttcagttggcta

SEQ ID NO: 15374 - RNA, 21 nt, RNAi-sense strand
uuauuccuucaguuggcuauu

SEQ ID NO: 15375 - RNA, 21 nt, RNAi-antisense strand
uagccaacugaaggaauaauu

SEQ ID NO: 15376 - DNA, 21 bp, Homo sapiens
catggccagtacagtggtagc

SEQ ID NO: 15377 - RNA, 21 nt, RNAi-sense strand
uggccaguacagugguagcuu

SEQ ID NO: 15378 - RNA, 21 nt, RNAi-antisense strand
gcuaccacuguacuggccauu

SEQ ID NO: 15379 - DNA, 21 bp, Homo sapiens
cagtacagtggtagcagttgg

SEQ ID NO: 15380 - RNA, 21 nt, RNAi-sense strand
guacagugguagcaguugguu

SEQ ID NO: 15381 - RNA, 21 nt, RNAi-antisense strand
ccaacugcuaccacuguacuu

SEQ ID NO: 15382 - DNA, 21 bp, Homo sapiens
cagtggtagcagttggactga

SEQ ID NO: 15383 - RNA, 21 nt, RNAi-sense strand
gugguagcaguuggacugauu

SEQ ID NO: 15384 - RNA, 21 nt, RNAi-antisense strand
ucaguccaacugcuaccacuu

SEQ ID NO: 15385 - DNA, 21 bp, Homo sapiens
cagttggactgaccattgctg

SEQ ID NO: 15386 - RNA, 21 nt, RNAi-sense strand
guuggacugaccauugcuguu

SEQ ID NO: 15387 - RNA, 21 nt, RNAi-antisense strand
cagcaauggucaguccaacuu

SEQ ID NO: 15388 - DNA, 21 bp, Homo sapiens
cattgctgctgcaggatttgc

SEQ ID NO: 15389 - RNA, 21 nt, RNAi-sense strand
uugcugcugcaggauuugcuu

SEQ ID NO: 15390 - RNA, 21 nt, RNAi-antisense strand
gcaaauccugcagcagcaauu

SEQ ID NO: 15391 - DNA, 21 bp, Homo sapiens
caggatttgcaggccgttacg

SEQ ID NO: 15392 - RNA, 21 nt, RNAi-sense strand
ggauuugcaggccguuacguu

SEQ ID NO: 15393 - RNA, 21 nt, RNAi-antisense strand
cguaacggccugcaaauccuu

SEQ ID NO: 15394 - DNA, 21 bp, Homo sapiens
caagccatgaagcatatggag

SEQ ID NO: 15395 - RNA, 21 nt, RNAi-sense strand
agccaugaagcauauggaguu

SEQ ID NO: 15396 - RNA, 21 nt, RNAi-antisense strand
cuccauaugcuucauggcuuu

SEQ ID NO: 15397 - DNA, 21 bp, Homo sapiens
catgaagcatatggagcctca

SEQ ID NO: 15398 - RNA, 21 nt, RNAi-sense strand
ugaagcauauggagccucauu

SEQ ID NO: 15399 - RNA, 21 nt, RNAi-antisense strand
ugaggcuccauaugcuucauu

SEQ ID NO: 15400 - DNA, 21 bp, Homo sapiens
cagtggtggctattatagagg

SEQ ID NO: 15401 - RNA, 21 nt, RNAi-sense strand
gugguggcuauuauagagguu

SEQ ID NO: 15402 - RNA, 21 nt, RNAi-antisense strand
ccucuauaauagccaccacuu

SEQ ID NO: 15403 - DNA, 21 bp, Homo sapiens
cagcattaatactaggtgtaa

SEQ ID NO: 15404 - RNA, 21 nt, RNAi-sense strand
gcauuaauacuagguguaauu

SEQ ID NO: 15405 - RNA, 21 nt, RNAi-antisense strand
uuacaccuaguauuaaugcuu

SEQ ID NO: 15406 - DNA, 21 bp, Homo sapiens
cattaatactaggtgtaagcc

SEQ ID NO: 15407 - RNA, 21 nt, RNAi-sense strand
uuaauacuagguguaagccuu

SEQ ID NO: 15408 - RNA, 21 nt, RNAi-antisense strand
ggcuuacaccuaguauuaauu

SEQ ID NO: 15409 - DNA, 21 bp, Homo sapiens
catcctgacaaaggaggatct

SEQ ID NO: 15410 - RNA, 21 nt, RNAi-sense strand
uccugacaaaggaggaucuuu

SEQ ID NO: 15411 - RNA, 21 nt, RNAi-antisense strand
agauccuccuuugucaggauu

SEQ ID NO: 15412 - DNA, 21 bp, Homo sapiens
caaaggaggatctccttatat

SEQ ID NO: 15413 - RNA, 21 nt, RNAi-sense strand
aaggaggaucuccuuauauuu

SEQ ID NO: 15414 - RNA, 21 nt, RNAi-antisense strand
auauaaggagauccuccuuuu

SEQ ID NO: 15415 - DNA, 21 bp, Homo sapiens
cacaagctaaatctcaaagcc

SEQ ID NO: 15416 - RNA, 21 nt, RNAi-sense strand
caagcuaaaucucaaagccuu

SEQ ID NO: 15417 - RNA, 21 nt, RNAi-antisense strand
ggcuuugagauuuagcuuguu

SEQ ID NO: 15418 - DNA, 21 bp, Homo sapiens
caagctaaatctcaaagcctt

SEQ ID NO: 15419 - RNA, 21 nt, RNAi-sense strand
agcuaaaucucaaagccuuuu

SEQ ID NO: 15420 - RNA, 21 nt, RNAi-antisense strand
aaggcuuugagauuuagcuuu

SEQ ID NO: 15421 - DNA, 21 bp, Homo sapiens
caagcacacaccttctgaata

SEQ ID NO: 15422 - RNA, 21 nt, RNAi-sense strand
agcacacaccuucugaauauu

SEQ ID NO: 15423 - RNA, 21 nt, RNAi-antisense strand
uauucagaaggugugugcuuu

SEQ ID NO: 15424 - DNA, 21 bp, Homo sapiens
cacacaccttctgaatagaaa

SEQ ID NO: 15425 - RNA, 21 nt, RNAi-sense strand
cacaccuucugaauagaaauu

SEQ ID NO: 15426 - RNA, 21 nt, RNAi-antisense strand
uuucuauucagaagguguguu

SEQ ID NO: 15427 - DNA, 21 bp, Homo sapiens
cacaccttctgaatagaaata

SEQ ID NO: 15428 - RNA, 21 nt, RNAi-sense strand
caccuucugaauagaaauauu

SEQ ID NO: 15429 - RNA, 21 nt, RNAi-antisense strand
uauuucuauucagaagguguu

SEQ ID NO: 15430 - DNA, 21 bp, Homo sapiens
caaggcaaagtgaagatgaca

SEQ ID NO: 15431 - RNA, 21 nt, RNAi-sense strand
aggcaaagugaagaugacauu

SEQ ID NO: 15432 - RNA, 21 nt, RNAi-antisense strand
ugucaucuucacuuugccuuu

SEQ ID NO: 15433 - DNA, 21 bp, Homo sapiens
caaagtgaagatgacagtcct

SEQ ID NO: 15434 - RNA, 21 nt, RNAi-sense strand
aagugaagaugacaguccuuu

SEQ ID NO: 15435 - RNA, 21 nt, RNAi-antisense strand
aggacugucaucuucacuuuu

SEQ ID NO: 15436 - DNA, 21 bp, Homo sapiens
caggtacaggcaactggcctg

SEQ ID NO: 15437 - RNA, 21 nt, RNAi-sense strand
gguacaggcaacuggccuguu

SEQ ID NO: 15438 - RNA, 21 nt, RNAi-antisense strand
caggccaguugccuguaccuu

SEQ ID NO: 15439 - DNA, 21 bp, Homo sapiens
caggcaactggcctggcaact

SEQ ID NO: 15440 - RNA, 21 nt, RNAi-sense strand
ggcaacuggccuggcaacuuu

SEQ ID NO: 15441 - RNA, 21 nt, RNAi-antisense strand
aguugccaggccaguugccuu

SEQ ID NO: 15442 - DNA, 21 bp, Homo sapiens
caactggcctggcaacttgga

SEQ ID NO: 15443 - RNA, 21 nt, RNAi-sense strand
acuggccuggcaacuuggauu

SEQ ID NO: 15444 - RNA, 21 nt, RNAi-antisense strand
uccaaguugccaggccaguuu

SEQ ID NO: 15445 - DNA, 21 bp, Homo sapiens
caacttggatacttggaacct

SEQ ID NO: 15446 - RNA, 21 nt, RNAi-sense strand
acuuggauacuuggaaccuuu

SEQ ID NO: 15447 - RNA, 21 nt, RNAi-antisense strand
agguuccaaguauccaaguuu

SEQ ID NO: 15448 - DNA, 21 bp, Homo sapiens
cacaactgagacctaagaaat

SEQ ID NO: 15449 - RNA, 21 nt, RNAi-sense strand
caacugagaccuaagaaauuu

SEQ ID NO: 15450 - RNA, 21 nt, RNAi-antisense strand
auuucuuaggucucaguuguu

SEQ ID NO: 15451 - DNA, 21 bp, Homo sapiens
caactgagacctaagaaattg

SEQ ID NO: 15452 - RNA, 21 nt, RNAi-sense strand
acugagaccuaagaaauuguu

SEQ ID NO: 15453 - RNA, 21 nt, RNAi-antisense strand
caauuucuuaggucucaguuu

SEQ ID NO: 15454 - DNA, 21 bp, Homo sapiens
cagagtacaggtctggtacaa

SEQ ID NO: 15455 - RNA, 21 nt, RNAi-sense strand
gaguacaggucugguacaauu

SEQ ID NO: 15456 - RNA, 21 nt, RNAi-antisense strand
uuguaccagaccuguacucuu

SEQ ID NO: 15457 - DNA, 21 bp, Homo sapiens
caggtctggtacaatcacagt

SEQ ID NO: 15458 - RNA, 21 nt, RNAi-sense strand
ggucugguacaaucacaguuu

SEQ ID NO: 15459 - RNA, 21 nt, RNAi-antisense strand
acugugauuguaccagaccuu

SEQ ID NO: 15460 - DNA, 21 bp, Homo sapiens
caatcacagttcattgcagcc

SEQ ID NO: 15461 - RNA, 21 nt, RNAi-sense strand
aucacaguucauugcagccuu

SEQ ID NO: 15462 - RNA, 21 nt, RNAi-antisense strand
ggcugcaaugaacugugauuu

SEQ ID NO: 15463 - DNA, 21 bp, Homo sapiens
cacagttcattgcagcctcaa

SEQ ID NO: 15464 - RNA, 21 nt, RNAi-sense strand
caguucauugcagccucaauu

SEQ ID NO: 15465 - RNA, 21 nt, RNAi-antisense strand
uugaggcugcaaugaacuguu

SEQ ID NO: 15466 - DNA, 21 bp, Homo sapiens
cagttcattgcagcctcaacc

SEQ ID NO: 15467 - RNA, 21 nt, RNAi-sense strand
guucauugcagccucaaccuu

SEQ ID NO: 15468 - RNA, 21 nt, RNAi-antisense strand
gguugaggcugcaaugaacuu

SEQ ID NO: 15469 - DNA, 21 bp, Homo sapiens
cattgcagcctcaacctcctg

SEQ ID NO: 15470 - RNA, 21 nt, RNAi-sense strand
uugcagccucaaccuccuguu

SEQ ID NO: 15471 - RNA, 21 nt, RNAi-antisense strand
caggagguugaggcugcaauu

SEQ ID NO: 15472 - DNA, 21 bp, Homo sapiens
caggcatgagtatttacattg

SEQ ID NO: 15473 - RNA, 21 nt, RNAi-sense strand
ggcaugaguauuuacauuguu

SEQ ID NO: 15474 - RNA, 21 nt, RNAi-antisense strand
caauguaaauacucaugccuu

SEQ ID NO: 15475 - DNA, 21 bp, Homo sapiens
cagttggctatttcttgacat

SEQ ID NO: 15476 - RNA, 21 nt, RNAi-sense strand
guuggcuauuucuugacauuu

SEQ ID NO: 15477 - RNA, 21 nt, RNAi-antisense strand
augucaagaaauagccaacuu

SEQ ID NO: 15478 - DNA, 21 bp, Homo sapiens
caaacttctgcaattgttatg

SEQ ID NO: 15479 - RNA, 21 nt, RNAi-sense strand
aacuucugcaauuguuauguu

SEQ ID NO: 15480 - RNA, 21 nt, RNAi-antisense strand
cauaacaauugcagaaguuuu

SEQ ID NO: 15481 - DNA, 21 bp, Homo sapiens
gagccatggccagtacagtgg

SEQ ID NO: 15482 - RNA, 21 nt, RNAi-sense strand
gccauggccaguacagugguu

SEQ ID NO: 15483 - RNA, 21 nt, RNAi-antisense strand
ccacuguacuggccauggcuu

SEQ ID NO: 15484 - DNA, 21 bp, Homo sapiens
gactgaccattgctgctgcag

SEQ ID NO: 15485 - RNA, 21 nt, RNAi-sense strand
cugaccauugcugcugcaguu

SEQ ID NO: 15486 - RNA, 21 nt, RNAi-antisense strand
cugcagcagcaauggucaguu

SEQ ID NO: 15487 - DNA, 21 bp, Homo sapiens
gaccattgctgctgcaggatt

SEQ ID NO: 15488 - RNA, 21 nt, RNAi-sense strand
ccauugcugcugcaggauuuu

SEQ ID NO: 15489 - RNA, 21 nt, RNAi-antisense strand
aauccugcagcagcaaugguu

SEQ ID NO: 15490 - DNA, 21 bp, Homo sapiens
gatttgcaggccgttacgttt

SEQ ID NO: 15491 - RNA, 21 nt, RNAi-sense strand
uuugcaggccguuacguuuuu

SEQ ID NO: 15492 - RNA, 21 nt, RNAi-antisense strand
aaacguaacggccugcaaauu

SEQ ID NO: 15493 - DNA, 21 bp, Homo sapiens
gaagcatatggagcctcaagt

SEQ ID NO: 15494 - RNA, 21 nt, RNAi-sense strand
agcauauggagccucaaguuu

SEQ ID NO: 15495 - RNA, 21 nt, RNAi-antisense strand
acuugaggcuccauaugcuuu

SEQ ID NO: 15496 - DNA, 21 bp, Homo sapiens
gaagcagcattaatactaggt

SEQ ID NO: 15497 - RNA, 21 nt, RNAi-sense strand
agcagcauuaauacuagguuu

SEQ ID NO: 15498 - RNA, 21 nt, RNAi-antisense strand
accuaguauuaaugcugcuuu

SEQ ID NO: 15499 - DNA, 21 bp, Homo sapiens
gagatgctcatcgacgaatta

SEQ ID NO: 15500 - RNA, 21 nt, RNAi-sense strand
gaugcucaucgacgaauuauu

SEQ ID NO: 15501 - RNA, 21 nt, RNAi-antisense strand
uaauucgucgaugagcaucuu

SEQ ID NO: 15502 - DNA, 21 bp, Homo sapiens
gatgctcatcgacgaattatg

SEQ ID NO: 15503 - RNA, 21 nt, RNAi-sense strand
ugcucaucgacgaauuauguu

SEQ ID NO: 15504 - RNA, 21 nt, RNAi-antisense strand
cauaauucgucgaugagcauu

SEQ ID NO: 15505 - DNA, 21 bp, Homo sapiens
gacaaaggaggatctccttat

SEQ ID NO: 15506 - RNA, 21 nt, RNAi-sense strand
caaaggaggaucuccuuauuu

SEQ ID NO: 15507 - RNA, 21 nt, RNAi-antisense strand
auaaggagauccuccuuuguu

SEQ ID NO: 15508 - DNA, 21 bp, Homo sapiens
gaggatctccttatatagcag

SEQ ID NO: 15509 - RNA, 21 nt, RNAi-sense strand
ggaucuccuuauauagcaguu

SEQ ID NO: 15510 - RNA, 21 nt, RNAi-antisense strand
cugcuauauaaggagauccuu

SEQ ID NO: 15511 - DNA, 21 bp, Homo sapiens
gatctccttatatagcagcca

SEQ ID NO: 15512 - RNA, 21 nt, RNAi-sense strand
ucuccuuauauagcagccauu

SEQ ID NO: 15513 - RNA, 21 nt, RNAi-antisense strand
uggcugcuauauaaggagauu

SEQ ID NO: 15514 - DNA, 21 bp, Homo sapiens
gatttactagaaggtcaagct

SEQ ID NO: 15515 - RNA, 21 nt, RNAi-sense strand
uuuacuagaaggucaagcuuu

SEQ ID NO: 15516 - RNA, 21 nt, RNAi-antisense strand
agcuugaccuucuaguaaauu

SEQ ID NO: 15517 - DNA, 21 bp, Homo sapiens
gatttagcacaagctaaatct

SEQ ID NO: 15518 - RNA, 21 nt, RNAi-sense strand
uuuagcacaagcuaaaucuuu

SEQ ID NO: 15519 - RNA, 21 nt, RNAi-antisense strand
agauuuagcuugugcuaaauu

SEQ ID NO: 15520 - DNA, 21 bp, Homo sapiens
gaagatgacagtccttgctct

SEQ ID NO: 15521 - RNA, 21 nt, RNAi-sense strand
agaugacaguccuugcucuuu

SEQ ID NO: 15522 - RNA, 21 nt, RNAi-antisense strand
agagcaaggacugucaucuuu

SEQ ID NO: 15523 - DNA, 21 bp, Homo sapiens
gatgacagtccttgctctcag

SEQ ID NO: 15524 - RNA, 21 nt, RNAi-sense strand
ugacaguccuugcucucaguu

SEQ ID NO: 15525 - RNA, 21 nt, RNAi-antisense strand
cugagagcaaggacugucauu

SEQ ID NO: 15526 - DNA, 21 bp, Homo sapiens
gagactgataaactggtaatt

SEQ ID NO: 15527 - RNA, 21 nt, RNAi-sense strand
gacugauaaacugguaauuuu

SEQ ID NO: 15528 - RNA, 21 nt, RNAi-antisense strand
aauuaccaguuuaucagucuu

SEQ ID NO: 15529 - DNA, 21 bp, Homo sapiens
gactgataaactggtaattag

SEQ ID NO: 15530 - RNA, 21 nt, RNAi-sense strand
cugauaaacugguaauuaguu

SEQ ID NO: 15531 - RNA, 21 nt, RNAi-antisense strand
cuaauuaccaguuuaucaguu

SEQ ID NO: 15532 - DNA, 21 bp, Homo sapiens
gataaactggtaattagactg

SEQ ID NO: 15533 - RNA, 21 nt, RNAi-sense strand
uaaacugguaauuagacuguu

SEQ ID NO: 15534 - RNA, 21 nt, RNAi-antisense strand
cagucuaauuaccaguuuauu

SEQ ID NO: 15535 - DNA, 21 bp, Homo sapiens
gatggaaattagcttaagctg

SEQ ID NO: 15536 - RNA, 21 nt, RNAi-sense strand
uggaaauuagcuuaagcuguu

SEQ ID NO: 15537 - RNA, 21 nt, RNAi-antisense strand
cagcuuaagcuaauuuccauu

SEQ ID NO: 15538 - DNA, 21 bp, Homo sapiens
gactcttcttattcggtggaa

SEQ ID NO: 15539 - RNA, 21 nt, RNAi-sense strand
cucuucuuauucgguggaauu

SEQ ID NO: 15540 - RNA, 21 nt, RNAi-antisense strand
uuccaccgaauaagaagaguu

SEQ ID NO: 15541 - DNA, 21 bp, Homo sapiens
gaaaggctgttccaggtacag

SEQ ID NO: 15542 - RNA, 21 nt, RNAi-sense strand
aaggcuguuccagguacaguu

SEQ ID NO: 15543 - RNA, 21 nt, RNAi-antisense strand
cuguaccuggaacagccuuuu

SEQ ID NO: 15544 - DNA, 21 bp, Homo sapiens
gatacttggaaccttgtattt

SEQ ID NO: 15545 - RNA, 21 nt, RNAi-sense strand
uacuuggaaccuuguauuuuu

SEQ ID NO: 15546 - RNA, 21 nt, RNAi-antisense strand
aaauacaagguuccaaguauu

SEQ ID NO: 15547 - DNA, 21 bp, Homo sapiens
gaatttaaccacaactgagac

SEQ ID NO: 15548 - RNA, 21 nt, RNAi-sense strand
auuuaaccacaacugagacuu

SEQ ID NO: 15549 - RNA, 21 nt, RNAi-antisense strand
gucucaguugugguuaaauuu

SEQ ID NO: 15550 - DNA, 21 bp, Homo sapiens
gagacctaagaaattgaccta

SEQ ID NO: 15551 - RNA, 21 nt, RNAi-sense strand
gaccuaagaaauugaccuauu

SEQ ID NO: 15552 - RNA, 21 nt, RNAi-antisense strand
uaggucaauuucuuaggucuu

SEQ ID NO: 15553 - DNA, 21 bp, Homo sapiens
gacctaagaaattgacctagg

SEQ ID NO: 15554 - RNA, 21 nt, RNAi-sense strand
ccuaagaaauugaccuagguu

SEQ ID NO: 15555 - RNA, 21 nt, RNAi-antisense strand
ccuaggucaauuucuuagguu

SEQ ID NO: 15556 - DNA, 21 bp, Homo sapiens
gataaagatttcagagtacag

SEQ ID NO: 15557 - RNA, 21 nt, RNAi-sense strand
uaaagauuucagaguacaguu

SEQ ID NO: 15558 - RNA, 21 nt, RNAi-antisense strand
cuguacucugaaaucuuuauu

SEQ ID NO: 15559 - DNA, 21 bp, Homo sapiens
gatttcagagtacaggtctgg

SEQ ID NO: 15560 - RNA, 21 nt, RNAi-sense strand
uuucagaguacaggucugguu

SEQ ID NO: 15561 - RNA, 21 nt, RNAi-antisense strand
ccagaccuguacucugaaauu

SEQ ID NO: 15562 - DNA, 21 bp, Homo sapiens
gagtacaggtctggtacaatc

SEQ ID NO: 15563 - RNA, 21 nt, RNAi-sense strand
guacaggucugguacaaucuu

SEQ ID NO: 15564 - RNA, 21 nt, RNAi-antisense strand
gauuguaccagaccuguacuu

SEQ ID NO: 15565 - DNA, 21 bp, Homo sapiens
gattacaggcatgagtattta

SEQ ID NO: 15566 - RNA, 21 nt, RNAi-sense strand
uuacaggcaugaguauuuauu

SEQ ID NO: 15567 - RNA, 21 nt, RNAi-antisense strand
uaaauacucaugccuguaauu

SEQ ID NO: 15568 - DNA, 21 bp, Homo sapiens
gacataatcaaacttctgcaa

SEQ ID NO: 15569 - RNA, 21 nt, RNAi-sense strand
cauaaucaaacuucugcaauu

SEQ ID NO: 15570 - RNA, 21 nt, RNAi-antisense strand
uugcagaaguuugauuauguu

SEQ ID NO: 15571 - DNA, 21 bp, Homo sapiens
taaaggcgtgcaggtgttggc

SEQ ID NO: 15572 - RNA, 21 nt, RNAi-sense strand
aaggcgugcagguguuggcuu

SEQ ID NO: 15573 - RNA, 21 nt, RNAi-antisense strand
gccaacaccugcacgccuuuu

SEQ ID NO: 15574 - DNA, 21 bp, Homo sapiens
tacagtggtagcagttggact

SEQ ID NO: 15575 - RNA, 21 nt, RNAi-sense strand
cagugguagcaguuggacuuu

SEQ ID NO: 15576 - RNA, 21 nt, RNAi-antisense strand
aguccaacugcuaccacuguu

SEQ ID NO: 15577 - DNA, 21 bp, Homo sapiens
tagcagttggactgaccattg

SEQ ID NO: 15578 - RNA, 21 nt, RNAi-sense strand
gcaguuggacugaccauuguu

SEQ ID NO: 15579 - RNA, 21 nt, RNAi-antisense strand
caauggucaguccaacugcuu

SEQ ID NO: 15580 - DNA, 21 bp, Homo sapiens
taagagatgctcatcgacgaa

SEQ ID NO: 15581 - RNA, 21 nt, RNAi-sense strand
agagaugcucaucgacgaauu

SEQ ID NO: 15582 - RNA, 21 nt, RNAi-antisense strand
uucgucgaugagcaucucuuu

SEQ ID NO: 15583 - DNA, 21 bp, Homo sapiens
taaatcatcctgacaaaggag

SEQ ID NO: 15584 - RNA, 21 nt, RNAi-sense strand
aaucauccugacaaaggaguu

SEQ ID NO: 15585 - RNA, 21 nt, RNAi-antisense strand
cuccuuugucaggaugauuuu

SEQ ID NO: 15586 - DNA, 21 bp, Homo sapiens
tagcacaagctaaatctcaaa

SEQ ID NO: 15587 - RNA, 21 nt, RNAi-sense strand
gcacaagcuaaaucucaaauu

SEQ ID NO: 15588 - RNA, 21 nt, RNAi-antisense strand
uuugagauuuagcuugugcuu

SEQ ID NO: 15589 - DNA, 21 bp, Homo sapiens
taaatctcaaagccttggtat

SEQ ID NO: 15590 - RNA, 21 nt, RNAi-sense strand
aaucucaaagccuugguauuu

SEQ ID NO: 15591 - RNA, 21 nt, RNAi-antisense strand
auaccaaggcuuugagauuuu

SEQ ID NO: 15592 - DNA, 21 bp, Homo sapiens
taaactggtaattagactgtg

SEQ ID NO: 15593 - RNA, 21 nt, RNAi-sense strand
aacugguaauuagacuguguu

SEQ ID NO: 15594 - RNA, 21 nt, RNAi-antisense strand
cacagucuaauuaccaguuuu

SEQ ID NO: 15595 - DNA, 21 bp, Homo sapiens
tagcttaagctgtttaagtag

SEQ ID NO: 15596 - RNA, 21 nt, RNAi-sense strand
gcuuaagcuguuuaaguaguu

SEQ ID NO: 15597 - RNA, 21 nt, RNAi-antisense strand
cuacuuaaacagcuuaagcuu

SEQ ID NO: 15598 - DNA, 21 bp, Homo sapiens
tattcggtggaaaggctgttc

SEQ ID NO: 15599 - RNA, 21 nt, RNAi-sense strand
uucgguggaaaggcuguucuu

SEQ ID NO: 15600 - RNA, 21 nt, RNAi-antisense strand
gaacagccuuuccaccgaauu

SEQ ID NO: 15601 - DNA, 21 bp, Homo sapiens
tacaggcaactggcctggcaa

SEQ ID NO: 15602 - RNA, 21 nt, RNAi-sense strand
caggcaacuggccuggcaauu

SEQ ID NO: 15603 - RNA, 21 nt, RNAi-antisense strand
uugccaggccaguugccuguu

SEQ ID NO: 15604 - DNA, 21 bp, Homo sapiens
taaccacaactgagacctaag

SEQ ID NO: 15605 - RNA, 21 nt, RNAi-sense strand
accacaacugagaccuaaguu

SEQ ID NO: 15606 - RNA, 21 nt, RNAi-antisense strand
cuuaggucucaguugugguuu

SEQ ID NO: 15607 - DNA, 21 bp, Homo sapiens
taaagatttcagagtacaggt

SEQ ID NO: 15608 - RNA, 21 nt, RNAi-sense strand
aagauuucagaguacagguuu

SEQ ID NO: 15609 - RNA, 21 nt, RNAi-antisense strand
accuguacucugaaaucuuuu

SEQ ID NO: 15610 - DNA, 21 bp, Homo sapiens
tacaggtctggtacaatcaca

SEQ ID NO: 15611 - RNA, 21 nt, RNAi-sense strand
caggucugguacaaucacauu

SEQ ID NO: 15612 - RNA, 21 nt, RNAi-antisense strand
ugugauuguaccagaccuguu

SEQ ID NO: 15613 - DNA, 21 bp, Homo sapiens
tacaatcacagttcattgcag

SEQ ID NO: 15614 - RNA, 21 nt, RNAi-sense strand
caaucacaguucauugcaguu

SEQ ID NO: 15615 - RNA, 21 nt, RNAi-antisense strand
cugcaaugaacugugauuguu

SEQ ID NO: 15616 - DNA, 21 bp, Homo sapiens
tacaggcatgagtatttacat

SEQ ID NO: 15617 - RNA, 21 nt, RNAi-sense strand
caggcaugaguauuuacauuu

SEQ ID NO: 15618 - RNA, 21 nt, RNAi-antisense strand
auguaaauacucaugccuguu

SEQ ID NO: 15619 - DNA, 21 bp, Homo sapiens
taaattattccttcagttggc

SEQ ID NO: 15620 - RNA, 21 nt, RNAi-sense strand
aauuauuccuucaguuggcuu

SEQ ID NO: 15621 - RNA, 21 nt, RNAi-antisense strand
gccaacugaaggaauaauuuu

SEQ ID NO: 15622 - DNA, 21 bp, Homo sapiens
tattccttcagttggctattt

SEQ ID NO: 15623 - RNA, 21 nt, RNAi-sense strand
uuccuucaguuggcuauuuuu

SEQ ID NO: 15624 - RNA, 21 nt, RNAi-antisense strand
aaauagccaacugaaggaauu

SEQ ID NO: 15625 - DNA, 21 bp, Homo sapiens
aaaggcgtgcaggtgttggcc

SEQ ID NO: 15626 - RNA, 21 nt, RNAi-sense strand
aggcgugcagguguuggccuu

SEQ ID NO: 15627 - RNA, 21 nt, RNAi-antisense strand
ggccaacaccugcacgccuuu

SEQ ID NO: 15628 - DNA, 21 bp, Homo sapiens
aagccatgaagcatatggagc

SEQ ID NO: 15629 - RNA, 21 nt, RNAi-sense strand
gccaugaagcauauggagcuu

SEQ ID NO: 15630 - RNA, 21 nt, RNAi-antisense strand
gcuccauaugcuucauggcuu

SEQ ID NO: 15631 - DNA, 21 bp, Homo sapiens
aagcatatggagcctcaagta

SEQ ID NO: 15632 - RNA, 21 nt, RNAi-sense strand
gcauauggagccucaaguauu

SEQ ID NO: 15633 - RNA, 21 nt, RNAi-antisense strand
uacuugaggcuccauaugcuu

SEQ ID NO: 15634 - DNA, 21 bp, Homo sapiens
aaatctgccttcagtggtggc

SEQ ID NO: 15635 - RNA, 21 nt, RNAi-sense strand
aucugccuucagugguggcuu

SEQ ID NO: 15636 - RNA, 21 nt, RNAi-antisense strand
gccaccacugaaggcagauuu

SEQ ID NO: 15637 - DNA, 21 bp, Homo sapiens
aatctgccttcagtggtggct

SEQ ID NO: 15638 - RNA, 21 nt, RNAi-sense strand
ucugccuucagugguggcuuu

SEQ ID NO: 15639 - RNA, 21 nt, RNAi-antisense strand
agccaccacugaaggcagauu

SEQ ID NO: 15640 - DNA, 21 bp, Homo sapiens
aagcagcattaatactaggtg

SEQ ID NO: 15641 - RNA, 21 nt, RNAi-sense strand
gcagcauuaauacuagguguu

SEQ ID NO: 15642 - RNA, 21 nt, RNAi-antisense strand
caccuaguauuaaugcugcuu

SEQ ID NO: 15643 - DNA, 21 bp, Homo sapiens
aaataagagatgctcatcgac

SEQ ID NO: 15644 - RNA, 21 nt, RNAi-sense strand
auaagagaugcucaucgacuu

SEQ ID NO: 15645 - RNA, 21 nt, RNAi-antisense strand
gucgaugagcaucucuuauuu

SEQ ID NO: 15646 - DNA, 21 bp, Homo sapiens
aataagagatgctcatcgacg

SEQ ID NO: 15647 - RNA, 21 nt, RNAi-sense strand
uaagagaugcucaucgacguu

SEQ ID NO: 15648 - RNA, 21 nt, RNAi-antisense strand
cgucgaugagcaucucuuauu

SEQ ID NO: 15649 - DNA, 21 bp, Homo sapiens
aagagatgctcatcgacgaat

SEQ ID NO: 15650 - RNA, 21 nt, RNAi-sense strand
gagaugcucaucgacgaauuu

SEQ ID NO: 15651 - RNA, 21 nt, RNAi-antisense strand
auucgucgaugagcaucucuu

SEQ ID NO: 15652 - DNA, 21 bp, Homo sapiens
aaatcatcctgacaaaggagg

SEQ ID NO: 15653 - RNA, 21 nt, RNAi-sense strand
aucauccugacaaaggagguu

SEQ ID NO: 15654 - RNA, 21 nt, RNAi-antisense strand
ccuccuuugucaggaugauuu

SEQ ID NO: 15655 - DNA, 21 bp, Homo sapiens
aatcatcctgacaaaggagga

SEQ ID NO: 15656 - RNA, 21 nt, RNAi-sense strand
ucauccugacaaaggaggauu

SEQ ID NO: 15657 - RNA, 21 nt, RNAi-antisense strand
uccuccuuugucaggaugauu

SEQ ID NO: 15658 - DNA, 21 bp, Homo sapiens
aaaggaggatctccttatata

SEQ ID NO: 15659 - RNA, 21 nt, RNAi-sense strand
aggaggaucuccuuauauauu

SEQ ID NO: 15660 - RNA, 21 nt, RNAi-antisense strand
uauauaaggagauccuccuuu

SEQ ID NO: 15661 - DNA, 21 bp, Homo sapiens
aaggaggatctccttatatag

SEQ ID NO: 15662 - RNA, 21 nt, RNAi-sense strand
ggaggaucuccuuauauaguu

SEQ ID NO: 15663 - RNA, 21 nt, RNAi-antisense strand
cuauauaaggagauccuccuu

SEQ ID NO: 15664 - DNA, 21 bp, Homo sapiens
aagatttactagaaggtcaag

SEQ ID NO: 15665 - RNA, 21 nt, RNAi-sense strand
gauuuacuagaaggucaaguu

SEQ ID NO: 15666 - RNA, 21 nt, RNAi-antisense strand
cuugaccuucuaguaaaucuu

SEQ ID NO: 15667 - DNA, 21 bp, Homo sapiens
aaatgcctcagagctacaatt

SEQ ID NO: 15668 - RNA, 21 nt, RNAi-sense strand
augccucagagcuacaauuuu

SEQ ID NO: 15669 - RNA, 21 nt, RNAi-antisense strand
aauuguagcucugaggcauuu

SEQ ID NO: 15670 - DNA, 21 bp, Homo sapiens
aatgcctcagagctacaattt

SEQ ID NO: 15671 - RNA, 21 nt, RNAi-sense strand
ugccucagagcuacaauuuuu

SEQ ID NO: 15672 - RNA, 21 nt, RNAi-antisense strand
aaauuguagcucugaggcauu

SEQ ID NO: 15673 - DNA, 21 bp, Homo sapiens
aagctaaatctcaaagccttg

SEQ ID NO: 15674 - RNA, 21 nt, RNAi-sense strand
gcuaaaucucaaagccuuguu

SEQ ID NO: 15675 - RNA, 21 nt, RNAi-antisense strand
caaggcuuugagauuuagcuu

SEQ ID NO: 15676 - DNA, 21 bp, Homo sapiens
aaatctcaaagccttggtata

SEQ ID NO: 15677 - RNA, 21 nt, RNAi-sense strand
aucucaaagccuugguauauu

SEQ ID NO: 15678 - RNA, 21 nt, RNAi-antisense strand
uauaccaaggcuuugagauuu

SEQ ID NO: 15679 - DNA, 21 bp, Homo sapiens
aatctcaaagccttggtataa

SEQ ID NO: 15680 - RNA, 21 nt, RNAi-sense strand
ucucaaagccuugguauaauu

SEQ ID NO: 15681 - RNA, 21 nt, RNAi-antisense strand
uuauaccaaggcuuugagauu

SEQ ID NO: 15682 - DNA, 21 bp, Homo sapiens
aagcacacaccttctgaatag

SEQ ID NO: 15683 - RNA, 21 nt, RNAi-sense strand
gcacacaccuucugaauaguu

SEQ ID NO: 15684 - RNA, 21 nt, RNAi-antisense strand
cuauucagaaggugugugcuu

SEQ ID NO: 15685 - DNA, 21 bp, Homo sapiens
aaggcaaagtgaagatgacag

SEQ ID NO: 15686 - RNA, 21 nt, RNAi-sense strand
ggcaaagugaagaugacaguu

SEQ ID NO: 15687 - RNA, 21 nt, RNAi-antisense strand
cugucaucuucacuuugccuu

SEQ ID NO: 15688 - DNA, 21 bp, Homo sapiens
aaagtgaagatgacagtcctt

SEQ ID NO: 15689 - RNA, 21 nt, RNAi-sense strand
agugaagaugacaguccuuuu

SEQ ID NO: 15690 - RNA, 21 nt, RNAi-antisense strand
aaggacugucaucuucacuuu

SEQ ID NO: 15691 - DNA, 21 bp, Homo sapiens
aagtgaagatgacagtccttg

SEQ ID NO: 15692 - RNA, 21 nt, RNAi-sense strand
gugaagaugacaguccuuguu

SEQ ID NO: 15693 - RNA, 21 nt, RNAi-antisense strand
caaggacugucaucuucacuu

SEQ ID NO: 15694 - DNA, 21 bp, Homo sapiens
aagatgacagtccttgctctc

SEQ ID NO: 15695 - RNA, 21 nt, RNAi-sense strand
gaugacaguccuugcucucuu

SEQ ID NO: 15696 - RNA, 21 nt, RNAi-antisense strand
gagagcaaggacugucaucuu

SEQ ID NO: 15697 - DNA, 21 bp, Homo sapiens
aaactggtaattagactgtga

SEQ ID NO: 15698 - RNA, 21 nt, RNAi-sense strand
acugguaauuagacugugauu

SEQ ID NO: 15699 - RNA, 21 nt, RNAi-antisense strand
ucacagucuaauuaccaguuu

SEQ ID NO: 15700 - DNA, 21 bp, Homo sapiens
aactggtaattagactgtgat

SEQ ID NO: 15701 - RNA, 21 nt, RNAi-sense strand
cugguaauuagacugugauuu

SEQ ID NO: 15702 - RNA, 21 nt, RNAi-antisense strand
aucacagucuaauuaccaguu

SEQ ID NO: 15703 - DNA, 21 bp, Homo sapiens
aaaggctgttccaggtacagg

SEQ ID NO: 15704 - RNA, 21 nt, RNAi-sense strand
aggcuguuccagguacagguu

SEQ ID NO: 15705 - RNA, 21 nt, RNAi-antisense strand
ccuguaccuggaacagccuuu

SEQ ID NO: 15706 - DNA, 21 bp, Homo sapiens
aaggctgttccaggtacaggc

SEQ ID NO: 15707 - RNA, 21 nt, RNAi-sense strand
ggcuguuccagguacaggcuu

SEQ ID NO: 15708 - RNA, 21 nt, RNAi-antisense strand
gccuguaccuggaacagccuu

SEQ ID NO: 15709 - DNA, 21 bp, Homo sapiens
aactggcctggcaacttggat

SEQ ID NO: 15710 - RNA, 21 nt, RNAi-sense strand
cuggccuggcaacuuggauuu

SEQ ID NO: 15711 - RNA, 21 nt, RNAi-antisense strand
auccaaguugccaggccaguu

SEQ ID NO: 15712 - DNA, 21 bp, Homo sapiens
aacttggatacttggaacctt

SEQ ID NO: 15713 - RNA, 21 nt, RNAi-sense strand
cuuggauacuuggaaccuuuu

SEQ ID NO: 15714 - RNA, 21 nt, RNAi-antisense strand
aagguuccaaguauccaaguu

SEQ ID NO: 15715 - DNA, 21 bp, Homo sapiens
aagtgaatttaaccacaactg

SEQ ID NO: 15716 - RNA, 21 nt, RNAi-sense strand
gugaauuuaaccacaacuguu

SEQ ID NO: 15717 - RNA, 21 nt, RNAi-antisense strand
caguugugguuaaauucacuu

SEQ ID NO: 15718 - DNA, 21 bp, Homo sapiens
aatttaaccacaactgagacc

SEQ ID NO: 15719 - RNA, 21 nt, RNAi-sense strand
uuuaaccacaacugagaccuu

SEQ ID NO: 15720 - RNA, 21 nt, RNAi-antisense strand
ggucucaguugugguuaaauu

SEQ ID NO: 15721 - DNA, 21 bp, Homo sapiens
aaccacaactgagacctaaga

SEQ ID NO: 15722 - RNA, 21 nt, RNAi-sense strand
ccacaacugagaccuaagauu

SEQ ID NO: 15723 - RNA, 21 nt, RNAi-antisense strand
ucuuaggucucaguugugguu

SEQ ID NO: 15724 - DNA, 21 bp, Homo sapiens
aactgagacctaagaaattga

SEQ ID NO: 15725 - RNA, 21 nt, RNAi-sense strand
cugagaccuaagaaauugauu

SEQ ID NO: 15726 - RNA, 21 nt, RNAi-antisense strand
ucaauuucuuaggucucaguu

SEQ ID NO: 15727 - DNA, 21 bp, Homo sapiens
aaagatttcagagtacaggtc

SEQ ID NO: 15728 - RNA, 21 nt, RNAi-sense strand
agauuucagaguacaggucuu

SEQ ID NO: 15729 - RNA, 21 nt, RNAi-antisense strand
gaccuguacucugaaaucuuu

SEQ ID NO: 15730 - DNA, 21 bp, Homo sapiens
aagatttcagagtacaggtct

SEQ ID NO: 15731 - RNA, 21 nt, RNAi-sense strand
gauuucagaguacaggucuuu

SEQ ID NO: 15732 - RNA, 21 nt, RNAi-antisense strand
agaccuguacucugaaaucuu

SEQ ID NO: 15733 - DNA, 21 bp, Homo sapiens
aatcacagttcattgcagcct

SEQ ID NO: 15734 - RNA, 21 nt, RNAi-sense strand
ucacaguucauugcagccuuu

SEQ ID NO: 15735 - RNA, 21 nt, RNAi-antisense strand
aggcugcaaugaacugugauu

SEQ ID NO: 15736 - DNA, 21 bp, Homo sapiens
aaattattccttcagttggct

SEQ ID NO: 15737 - RNA, 21 nt, RNAi-sense strand
auuauuccuucaguuggcuuu

SEQ ID NO: 15738 - RNA, 21 nt, RNAi-antisense strand
agccaacugaaggaauaauuu

SEQ ID NO: 15739 - DNA, 21 bp, Homo sapiens
aattattccttcagttggcta

SEQ ID NO: 15740 - RNA, 21 nt, RNAi-sense strand
uuauuccuucaguuggcuauu

SEQ ID NO: 15741 - RNA, 21 nt, RNAi-antisense strand
uagccaacugaaggaauaauu

SEQ ID NO: 15742 - DNA, 21 bp, Homo sapiens
caagccatgaagcatatggag

SEQ ID NO: 15743 - RNA, 21 nt, RNAi-sense strand
agccaugaagcauauggaguu

SEQ ID NO: 15744 - RNA, 21 nt, RNAi-antisense strand
cuccauaugcuucauggcuuu

SEQ ID NO: 15745 - DNA, 21 bp, Homo sapiens
catgaagcatatggagcctca

SEQ ID NO: 15746 - RNA, 21 nt, RNAi-sense strand
ugaagcauauggagccucauu

SEQ ID NO: 15747 - RNA, 21 nt, RNAi-antisense strand
ugaggcuccauaugcuucauu

SEQ ID NO: 15748 - DNA, 21 bp, Homo sapiens
cagtggtggctattatagagg

SEQ ID NO: 15749 - RNA, 21 nt, RNAi-sense strand
gugguggcuauuauagagguu

SEQ ID NO: 15750 - RNA, 21 nt, RNAi-antisense strand
ccucuauaauagccaccacuu

SEQ ID NO: 15751 - DNA, 21 bp, Homo sapiens
cagcattaatactaggtgtaa

SEQ ID NO: 15752 - RNA, 21 nt, RNAi-sense strand
gcauuaauacuagguguaauu

SEQ ID NO: 15753 - RNA, 21 nt, RNAi-antisense strand
uuacaccuaguauuaaugcuu

SEQ ID NO: 15754 - DNA, 21 bp, Homo sapiens
cattaatactaggtgtaagcc

SEQ ID NO: 15755 - RNA, 21 nt, RNAi-sense strand
uuaauacuagguguaagccuu

SEQ ID NO: 15756 - RNA, 21 nt, RNAi-antisense strand
ggcuuacaccuaguauuaauu

SEQ ID NO: 15757 - DNA, 21 bp, Homo sapiens
catcctgacaaaggaggatct

SEQ ID NO: 15758 - RNA, 21 nt, RNAi-sense strand
uccugacaaaggaggaucuuu

SEQ ID NO: 15759 - RNA, 21 nt, RNAi-antisense strand
agauccuccuuugucaggauu

SEQ ID NO: 15760 - DNA, 21 bp, Homo sapiens
caaaggaggatctccttatat

SEQ ID NO: 15761 - RNA, 21 nt, RNAi-sense strand
aaggaggaucuccuuauauuu

SEQ ID NO: 15762 - RNA, 21 nt, RNAi-antisense strand
auauaaggagauccuccuuuu

SEQ ID NO: 15763 - DNA, 21 bp, Homo sapiens
cacaagctaaatctcaaagcc

SEQ ID NO: 15764 - RNA, 21 nt, RNAi-sense strand
caagcuaaaucucaaagccuu

SEQ ID NO: 15765 - RNA, 21 nt, RNAi-antisense strand
ggcuuugagauuuagcuuguu

SEQ ID NO: 15766 - DNA, 21 bp, Homo sapiens
caagctaaatctcaaagcctt

SEQ ID NO: 15767 - RNA, 21 nt, RNAi-sense strand
agcuaaaucucaaagccuuuu

SEQ ID NO: 15768 - RNA, 21 nt, RNAi-antisense strand
aaggcuuugagauuuagcuuu

SEQ ID NO: 15769 - DNA, 21 bp, Homo sapiens
caagcacacaccttctgaata

SEQ ID NO: 15770 - RNA, 21 nt, RNAi-sense strand
agcacacaccuucugaauauu

SEQ ID NO: 15771 - RNA, 21 nt, RNAi-antisense strand
uauucagaaggugugugcuuu

SEQ ID NO: 15772 - DNA, 21 bp, Homo sapiens
cacacaccttctgaatagaaa

SEQ ID NO: 15773 - RNA, 21 nt, RNAi-sense strand
cacaccuucugaauagaaauu

SEQ ID NO: 15774 - RNA, 21 nt, RNAi-antisense strand
uuucuauucagaagguguguu

SEQ ID NO: 15775 - DNA, 21 bp, Homo sapiens
cacaccttctgaatagaaata

SEQ ID NO: 15776 - RNA, 21 nt, RNAi-sense strand
caccuucugaauagaaauauu

SEQ ID NO: 15777 - RNA, 21 nt, RNAi-antisense strand
uauuucuauucagaagguguu

SEQ ID NO: 15778 - DNA, 21 bp, Homo sapiens
caaggcaaagtgaagatgaca

SEQ ID NO: 15779 - RNA, 21 nt, RNAi-sense strand
aggcaaagugaagaugacauu

SEQ ID NO: 15780 - RNA, 21 nt, RNAi-antisense strand
ugucaucuucacuuugccuuu

SEQ ID NO: 15781 - DNA, 21 bp, Homo sapiens
caaagtgaagatgacagtcct

SEQ ID NO: 15782 - RNA, 21 nt, RNAi-sense strand
aagugaagaugacaguccuuu

SEQ ID NO: 15783 - RNA, 21 nt, RNAi-antisense strand
aggacugucaucuucacuuuu

SEQ ID NO: 15784 - DNA, 21 bp, Homo sapiens
caggtacaggcaactggcctg

SEQ ID NO: 15785 - RNA, 21 nt, RNAi-sense strand
gguacaggcaacuggccuguu

SEQ ID NO: 15786 - RNA, 21 nt, RNAi-antisense strand
caggccaguugccuguaccuu

SEQ ID NO: 15787 - DNA, 21 bp, Homo sapiens
caggcaactggcctggcaact

SEQ ID NO: 15788 - RNA, 21 nt, RNAi-sense strand
ggcaacuggccuggcaacuuu

SEQ ID NO: 15789 - RNA, 21 nt, RNAi-antisense strand
aguugccaggccaguugccuu

SEQ ID NO: 15790 - DNA, 21 bp, Homo sapiens
caactggcctggcaacttgga

SEQ ID NO: 15791 - RNA, 21 nt, RNAi-sense strand
acuggccuggcaacuuggauu

SEQ ID NO: 15792 - RNA, 21 nt, RNAi-antisense strand
uccaaguugccaggccaguuu

SEQ ID NO: 15793 - DNA, 21 bp, Homo sapiens
caacttggatacttggaacct

SEQ ID NO: 15794 - RNA, 21 nt, RNAi-sense strand
acuuggauacuuggaaccuuu

SEQ ID NO: 15795 - RNA, 21 nt, RNAi-antisense strand
agguuccaaguauccaaguuu

SEQ ID NO: 15796 - DNA, 21 bp, Homo sapiens
cacaactgagacctaagaaat

SEQ ID NO: 15797 - RNA, 21 nt, RNAi-sense strand
caacugagaccuaagaaauuu

SEQ ID NO: 15798 - RNA, 21 nt, RNAi-antisense strand
auuucuuaggucucaguuguu

SEQ ID NO: 15799 - DNA, 21 bp, Homo sapiens
caactgagacctaagaaattg

SEQ ID NO: 15800 - RNA, 21 nt, RNAi-sense strand
acugagaccuaagaaauuguu

SEQ ID NO: 15801 - RNA, 21 nt, RNAi-antisense strand
caauuucuuaggucucaguuu

SEQ ID NO: 15802 - DNA, 21 bp, Homo sapiens
cagagtacaggtctggtacaa

SEQ ID NO: 15803 - RNA, 21 nt, RNAi-sense strand
gaguacaggucugguacaauu

SEQ ID NO: 15804 - RNA, 21 nt, RNAi-antisense strand
uuguaccagaccuguacucuu

SEQ ID NO: 15805 - DNA, 21 bp, Homo sapiens
caggtctggtacaatcacagt

SEQ ID NO: 15806 - RNA, 21 nt, RNAi-sense strand
ggucugguacaaucacaguuu

SEQ ID NO: 15807 - RNA, 21 nt, RNAi-antisense strand
acugugauuguaccagaccuu

SEQ ID NO: 15808 - DNA, 21 bp, Homo sapiens
caatcacagttcattgcagcc

SEQ ID NO: 15809 - RNA, 21 nt, RNAi-sense strand
aucacaguucauugcagccuu

SEQ ID NO: 15810 - RNA, 21 nt, RNAi-antisense strand
ggcugcaaugaacugugauuu

SEQ ID NO: 15811 - DNA, 21 bp, Homo sapiens
cacagttcattgcagcctcaa

SEQ ID NO: 15812 - RNA, 21 nt, RNAi-sense strand
caguucauugcagccucaauu

SEQ ID NO: 15813 - RNA, 21 nt, RNAi-antisense strand
uugaggcugcaaugaacuguu

SEQ ID NO: 15814 - DNA, 21 bp, Homo sapiens
cagttcattgcagcctcaacc

SEQ ID NO: 15815 - RNA, 21 nt, RNAi-sense strand
guucauugcagccucaaccuu

SEQ ID NO: 15816 - RNA, 21 nt, RNAi-antisense strand
gguugaggcugcaaugaacuu

SEQ ID NO: 15817 - DNA, 21 bp, Homo sapiens
cattgcagcctcaacctcctg

SEQ ID NO: 15818 - RNA, 21 nt, RNAi-sense strand
uugcagccucaaccuccuguu

SEQ ID NO: 15819 - RNA, 21 nt, RNAi-antisense strand
caggagguugaggcugcaauu

SEQ ID NO: 15820 - DNA, 21 bp, Homo sapiens
caggcatgagtatttacattg

SEQ ID NO: 15821 - RNA, 21 nt, RNAi-sense strand
ggcaugaguauuuacauuguu

SEQ ID NO: 15822 - RNA, 21 nt, RNAi-antisense strand
caauguaaauacucaugccuu

SEQ ID NO: 15823 - DNA, 21 bp, Homo sapiens
cagttggctatttcttgacat

SEQ ID NO: 15824 - RNA, 21 nt, RNAi-sense strand
guuggcuauuucuugacauuu

SEQ ID NO: 15825 - RNA, 21 nt, RNAi-antisense strand
augucaagaaauagccaacuu

SEQ ID NO: 15826 - DNA, 21 bp, Homo sapiens
caaacttctgcaattgttatg

SEQ ID NO: 15827 - RNA, 21 nt, RNAi-sense strand
aacuucugcaauuguuauguu

SEQ ID NO: 15828 - RNA, 21 nt, RNAi-antisense strand
cauaacaauugcagaaguuuu

SEQ ID NO: 15829 - DNA, 21 bp, Homo sapiens
gaagcatatggagcctcaagt

SEQ ID NO: 15830 - RNA, 21 nt, RNAi-sense strand
agcauauggagccucaaguuu

SEQ ID NO: 15831 - RNA, 21 nt, RNAi-antisense strand
acuugaggcuccauaugcuuu

SEQ ID NO: 15832 - DNA, 21 bp, Homo sapiens
gaagcagcattaatactaggt

SEQ ID NO: 15833 - RNA, 21 nt, RNAi-sense strand
agcagcauuaauacuagguuu

SEQ ID NO: 15834 - RNA, 21 nt, RNAi-antisense strand
accuaguauuaaugcugcuuu

SEQ ID NO: 15835 - DNA, 21 bp, Homo sapiens
gagatgctcatcgacgaatta

SEQ ID NO: 15836 - RNA, 21 nt, RNAi-sense strand
gaugcucaucgacgaauuauu

SEQ ID NO: 15837 - RNA, 21 nt, RNAi-antisense strand
uaauucgucgaugagcaucuu

SEQ ID NO: 15838 - DNA, 21 bp, Homo sapiens
gatgctcatcgacgaattatg

SEQ ID NO: 15839 - RNA, 21 nt, RNAi-sense strand
ugcucaucgacgaauuauguu

SEQ ID NO: 15840 - RNA, 21 nt, RNAi-antisense strand
cauaauucgucgaugagcauu

SEQ ID NO: 15841 - DNA, 21 bp, Homo sapiens
gacaaaggaggatctccttat

SEQ ID NO: 15842 - RNA, 21 nt, RNAi-sense strand
caaaggaggaucuccuuauuu

SEQ ID NO: 15843 - RNA, 21 nt, RNAi-antisense strand
auaaggagauccuccuuuguu

SEQ ID NO: 15844 - DNA, 21 bp, Homo sapiens
gaggatctccttatatagcag

SEQ ID NO: 15845 - RNA, 21 nt, RNAi-sense strand
ggaucuccuuauauagcaguu

SEQ ID NO: 15846 - RNA, 21 nt, RNAi-antisense strand
cugcuauauaaggagauccuu

SEQ ID NO: 15847 - DNA, 21 bp, Homo sapiens
gatctccttatatagcagcca

SEQ ID NO: 15848 - RNA, 21 nt, RNAi-sense strand
ucuccuuauauagcagccauu

SEQ ID NO: 15849 - RNA, 21 nt, RNAi-antisense strand
uggcugcuauauaaggagauu

SEQ ID NO: 15850 - DNA, 21 bp, Homo sapiens
gatttactagaaggtcaagct

SEQ ID NO: 15851 - RNA, 21 nt, RNAi-sense strand
uuuacuagaaggucaagcuuu

SEQ ID NO: 15852 - RNA, 21 nt, RNAi-antisense strand
agcuugaccuucuaguaaauu

SEQ ID NO: 15853 - DNA, 21 bp, Homo sapiens
gatttagcacaagctaaatct

SEQ ID NO: 15854 - RNA, 21 nt, RNAi-sense strand
uuuagcacaagcuaaaucuuu

SEQ ID NO: 15855 - RNA, 21 nt, RNAi-antisense strand
agauuuagcuugugcuaaauu

SEQ ID NO: 15856 - DNA, 21 bp, Homo sapiens
gaagatgacagtccttgctct

SEQ ID NO: 15857 - RNA, 21 nt, RNAi-sense strand
agaugacaguccuugcucuuu

SEQ ID NO: 15858 - RNA, 21 nt, RNAi-antisense strand
agagcaaggacugucaucuuu

SEQ ID NO: 15859 - DNA, 21 bp, Homo sapiens
gatgacagtccttgctctcag

SEQ ID NO: 15860 - RNA, 21 nt, RNAi-sense strand
ugacaguccuugcucucaguu

SEQ ID NO: 15861 - RNA, 21 nt, RNAi-antisense strand
cugagagcaaggacugucauu

SEQ ID NO: 15862 - DNA, 21 bp, Homo sapiens
gagactgataaactggtaatt

SEQ ID NO: 15863 - RNA, 21 nt, RNAi-sense strand
gacugauaaacugguaauuuu

SEQ ID NO: 15864 - RNA, 21 nt, RNAi-antisense strand
aauuaccaguuuaucagucuu

SEQ ID NO: 15865 - DNA, 21 bp, Homo sapiens
gactgataaactggtaattag

SEQ ID NO: 15866 - RNA, 21 nt, RNAi-sense strand
cugauaaacugguaauuaguu

SEQ ID NO: 15867 - RNA, 21 nt, RNAi-antisense strand
cuaauuaccaguuuaucaguu

SEQ ID NO: 15868 - DNA, 21 bp, Homo sapiens
gataaactggtaattagactg

SEQ ID NO: 15869 - RNA, 21 nt, RNAi-sense strand
uaaacugguaauuagacuguu

SEQ ID NO: 15870 - RNA, 21 nt, RNAi-antisense strand
cagucuaauuaccaguuuauu

SEQ ID NO: 15871 - DNA, 21 bp, Homo sapiens
gatggaaattagcttaagctg

SEQ ID NO: 15872 - RNA, 21 nt, RNAi-sense strand
uggaaauuagcuuaagcuguu

SEQ ID NO: 15873 - RNA, 21 nt, RNAi-antisense strand
cagcuuaagcuaauuuccauu

SEQ ID NO: 15874 - DNA, 21 bp, Homo sapiens
gactcttcttattcggtggaa

SEQ ID NO: 15875 - RNA, 21 nt, RNAi-sense strand
cucuucuuauucgguggaauu

SEQ ID NO: 15876 - RNA, 21 nt, RNAi-antisense strand
uuccaccgaauaagaagaguu

SEQ ID NO: 15877 - DNA, 21 bp, Homo sapiens
gaaaggctgttccaggtacag

SEQ ID NO: 15878 - RNA, 21 nt, RNAi-sense strand
aaggcuguuccagguacaguu

SEQ ID NO: 15879 - RNA, 21 nt, RNAi-antisense strand
cuguaccuggaacagccuuuu

SEQ ID NO: 15880 - DNA, 21 bp, Homo sapiens
gatacttggaaccttgtattt

SEQ ID NO: 15881 - RNA, 21 nt, RNAi-sense strand
uacuuggaaccuuguauuuuu

SEQ ID NO: 15882 - RNA, 21 nt, RNAi-antisense strand
aaauacaagguuccaaguauu

SEQ ID NO: 15883 - DNA, 21 bp, Homo sapiens
gaatttaaccacaactgagac

SEQ ID NO: 15884 - RNA, 21 nt, RNAi-sense strand
auuuaaccacaacugagacuu

SEQ ID NO: 15885 - RNA, 21 nt, RNAi-antisense strand
gucucaguugugguuaaauuu

SEQ ID NO: 15886 - DNA, 21 bp, Homo sapiens
gagacctaagaaattgaccta

SEQ ID NO: 15887 - RNA, 21 nt, RNAi-sense strand
gaccuaagaaauugaccuauu

SEQ ID NO: 15888 - RNA, 21 nt, RNAi-antisense strand
uaggucaauuucuuaggucuu

SEQ ID NO: 15889 - DNA, 21 bp, Homo sapiens
gacctaagaaattgacctagg

SEQ ID NO: 15890 - RNA, 21 nt, RNAi-sense strand
ccuaagaaauugaccuagguu

SEQ ID NO: 15891 - RNA, 21 nt, RNAi-antisense strand
ccuaggucaauuucuuagguu

SEQ ID NO: 15892 - DNA, 21 bp, Homo sapiens
gataaagatttcagagtacag

SEQ ID NO: 15893 - RNA, 21 nt, RNAi-sense strand
uaaagauuucagaguacaguu

SEQ ID NO: 15894 - RNA, 21 nt, RNAi-antisense strand
cuguacucugaaaucuuuauu

SEQ ID NO: 15895 - DNA, 21 bp, Homo sapiens
gatttcagagtacaggtctgg

SEQ ID NO: 15896 - RNA, 21 nt, RNAi-sense strand
uuucagaguacaggucugguu

SEQ ID NO: 15897 - RNA, 21 nt, RNAi-antisense strand
ccagaccuguacucugaaauu

SEQ ID NO: 15898 - DNA, 21 bp, Homo sapiens
gagtacaggtctggtacaatc

SEQ ID NO: 15899 - RNA, 21 nt, RNAi-sense strand
guacaggucugguacaaucuu

SEQ ID NO: 15900 - RNA, 21 nt, RNAi-antisense strand
gauuguaccagaccuguacuu

SEQ ID NO: 15901 - DNA, 21 bp, Homo sapiens
gattacaggcatgagtattta

SEQ ID NO: 15902 - RNA, 21 nt, RNAi-sense strand
uuacaggcaugaguauuuauu

SEQ ID NO: 15903 - RNA, 21 nt, RNAi-antisense strand
uaaauacucaugccuguaauu

SEQ ID NO: 15904 - DNA, 21 bp, Homo sapiens
gacataatcaaacttctgcaa

SEQ ID NO: 15905 - RNA, 21 nt, RNAi-sense strand
cauaaucaaacuucugcaauu

SEQ ID NO: 15906 - RNA, 21 nt, RNAi-antisense strand
uugcagaaguuugauuauguu

SEQ ID NO: 15907 - DNA, 21 bp, Homo sapiens
taaaggcgtgcaggtgttggc

SEQ ID NO: 15908 - RNA, 21 nt, RNAi-sense strand
aaggcgugcagguguuggcuu

SEQ ID NO: 15909 - RNA, 21 nt, RNAi-antisense strand
gccaacaccugcacgccuuuu

SEQ ID NO: 15910 - DNA, 21 bp, Homo sapiens
taagagatgctcatcgacgaa

SEQ ID NO: 15911 - RNA, 21 nt, RNAi-sense strand
agagaugcucaucgacgaauu

SEQ ID NO: 15912 - RNA, 21 nt, RNAi-antisense strand
uucgucgaugagcaucucuuu

SEQ ID NO: 15913 - DNA, 21 bp, Homo sapiens
taaatcatcctgacaaaggag

SEQ ID NO: 15914 - RNA, 21 nt, RNAi-sense strand
aaucauccugacaaaggaguu

SEQ ID NO: 15915 - RNA, 21 nt, RNAi-antisense strand
cuccuuugucaggaugauuuu

SEQ ID NO: 15916 - DNA, 21 bp, Homo sapiens
tagcacaagctaaatctcaaa

SEQ ID NO: 15917 - RNA, 21 nt, RNAi-sense strand
gcacaagcuaaaucucaaauu

SEQ ID NO: 15918 - RNA, 21 nt, RNAi-antisense strand
uuugagauuuagcuugugcuu

SEQ ID NO: 15919 - DNA, 21 bp, Homo sapiens
taaatctcaaagccttggtat

SEQ ID NO: 15920 - RNA, 21 nt, RNAi-sense strand
aaucucaaagccuugguauuu

SEQ ID NO: 15921 - RNA, 21 nt, RNAi-antisense strand
auaccaaggcuuugagauuuu

SEQ ID NO: 15922 - DNA, 21 bp, Homo sapiens
taaactggtaattagactgtg

SEQ ID NO: 15923 - RNA, 21 nt, RNAi-sense strand
aacugguaauuagacuguguu

SEQ ID NO: 15924 - RNA, 21 nt, RNAi-antisense strand
cacagucuaauuaccaguuuu

SEQ ID NO: 15925 - DNA, 21 bp, Homo sapiens
tagcttaagctgtttaagtag

SEQ ID NO: 15926 - RNA, 21 nt, RNAi-sense strand
gcuuaagcuguuuaaguaguu

SEQ ID NO: 15927 - RNA, 21 nt, RNAi-antisense strand
cuacuuaaacagcuuaagcuu

SEQ ID NO: 15928 - DNA, 21 bp, Homo sapiens
tattcggtggaaaggctgttc

SEQ ID NO: 15929 - RNA, 21 nt, RNAi-sense strand
uucgguggaaaggcuguucuu

SEQ ID NO: 15930 - RNA, 21 nt, RNAi-antisense strand
gaacagccuuuccaccgaauu

SEQ ID NO: 15931 - DNA, 21 bp, Homo sapiens
tacaggcaactggcctggcaa

SEQ ID NO: 15932 - RNA, 21 nt, RNAi-sense strand
caggcaacuggccuggcaauu

SEQ ID NO: 15933 - RNA, 21 nt, RNAi-antisense strand
uugccaggccaguugccuguu

SEQ ID NO: 15934 - DNA, 21 bp, Homo sapiens
taaccacaactgagacctaag

SEQ ID NO: 15935 - RNA, 21 nt, RNAi-sense strand
accacaacugagaccuaaguu

SEQ ID NO: 15936 - RNA, 21 nt, RNAi-antisense strand
cuuaggucucaguugugguuu

SEQ ID NO: 15937 - DNA, 21 bp, Homo sapiens
taaagatttcagagtacaggt

SEQ ID NO: 15938 - RNA, 21 nt, RNAi-sense strand
aagauuucagaguacagguuu

SEQ ID NO: 15939 - RNA, 21 nt, RNAi-antisense strand
accuguacucugaaaucuuuu

SEQ ID NO: 15940 - DNA, 21 bp, Homo sapiens
tacaggtctggtacaatcaca

SEQ ID NO: 15941 - RNA, 21 nt, RNAi-sense strand
caggucugguacaaucacauu

SEQ ID NO: 15942 - RNA, 21 nt, RNAi-antisense strand
ugugauuguaccagaccuguu

SEQ ID NO: 15943 - DNA, 21 bp, Homo sapiens
tacaatcacagttcattgcag

SEQ ID NO: 15944 - RNA, 21 nt, RNAi-sense strand
caaucacaguucauugcaguu

SEQ ID NO: 15945 - RNA, 21 nt, RNAi-antisense strand
cugcaaugaacugugauuguu

SEQ ID NO: 15946 - DNA, 21 bp, Homo sapiens
tacaggcatgagtatttacat

SEQ ID NO: 15947 - RNA, 21 nt, RNAi-sense strand
caggcaugaguauuuacauuu

SEQ ID NO: 15948 - RNA, 21 nt, RNAi-antisense strand
auguaaauacucaugccuguu

SEQ ID NO: 15949 - DNA, 21 bp, Homo sapiens
taaattattccttcagttggc

SEQ ID NO: 15950 - RNA, 21 nt, RNAi-sense strand
aauuauuccuucaguuggcuu

SEQ ID NO: 15951 - RNA, 21 nt, RNAi-antisense strand
gccaacugaaggaauaauuuu

SEQ ID NO: 15952 - DNA, 21 bp, Homo sapiens
tattccttcagttggctattt

SEQ ID NO: 15953 - RNA, 21 nt, RNAi-sense strand
uuccuucaguuggcuauuuuu

SEQ ID NO: 15954 - RNA, 21 nt, RNAi-antisense strand
aaauagccaacugaaggaauu

SEQ ID NO: 15955 - DNA, 21 bp, Homo sapiens
aaaggcgtgcaggtgttggcc

SEQ ID NO: 15956 - RNA, 21 nt, RNAi-sense strand
aggcgugcagguguuggccuu

SEQ ID NO: 15957 - RNA, 21 nt, RNAi-antisense strand
ggccaacaccugcacgccuuu

SEQ ID NO: 15958 - DNA, 21 bp, Homo sapiens
aagccatgaagcatatggagc

SEQ ID NO: 15959 - RNA, 21 nt, RNAi-sense strand
gccaugaagcauauggagcuu

SEQ ID NO: 15960 - RNA, 21 nt, RNAi-antisense strand
gcuccauaugcuucauggcuu

SEQ ID NO: 15961 - DNA, 21 bp, Homo sapiens
aagcatatggagcctcaagta

SEQ ID NO: 15962 - RNA, 21 nt, RNAi-sense strand
gcauauggagccucaaguauu

SEQ ID NO: 15963 - RNA, 21 nt, RNAi-antisense strand
uacuugaggcuccauaugcuu

SEQ ID NO: 15964 - DNA, 21 bp, Homo sapiens
aaataagagatgctcatcgac

SEQ ID NO: 15965 - RNA, 21 nt, RNAi-sense strand
auaagagaugcucaucgacuu

SEQ ID NO: 15966 - RNA, 21 nt, RNAi-antisense strand
gucgaugagcaucucuuauuu

SEQ ID NO: 15967 - DNA, 21 bp, Homo sapiens
aataagagatgctcatcgacg

SEQ ID NO: 15968 - RNA, 21 nt, RNAi-sense strand
uaagagaugcucaucgacguu

SEQ ID NO: 15969 - RNA, 21 nt, RNAi-antisense strand
cgucgaugagcaucucuuauu

SEQ ID NO: 15970 - DNA, 21 bp, Homo sapiens
aagagatgctcatcgacgaat

SEQ ID NO: 15971 - RNA, 21 nt, RNAi-sense strand
gagaugcucaucgacgaauuu

SEQ ID NO: 15972 - RNA, 21 nt, RNAi-antisense strand
auucgucgaugagcaucucuu

SEQ ID NO: 15973 - DNA, 21 bp, Homo sapiens
aaatcatcctgacaaaggagg

SEQ ID NO: 15974 - RNA, 21 nt, RNAi-sense strand
aucauccugacaaaggagguu

SEQ ID NO: 15975 - RNA, 21 nt, RNAi-antisense strand
ccuccuuugucaggaugauuu

SEQ ID NO: 15976 - DNA, 21 bp, Homo sapiens
aatcatcctgacaaaggagga

SEQ ID NO: 15977 - RNA, 21 nt, RNAi-sense strand
ucauccugacaaaggaggauu

SEQ ID NO: 15978 - RNA, 21 nt, RNAi-antisense strand
uccuccuuugucaggaugauu

SEQ ID NO: 15979 - DNA, 21 bp, Homo sapiens
aaaggaggatctccttatata

SEQ ID NO: 15980 - RNA, 21 nt, RNAi-sense strand
aggaggaucuccuuauauauu

SEQ ID NO: 15981 - RNA, 21 nt, RNAi-antisense strand
uauauaaggagauccuccuuu

SEQ ID NO: 15982 - DNA, 21 bp, Homo sapiens
aaggaggatctccttatatag

SEQ ID NO: 15983 - RNA, 21 nt, RNAi-sense strand
ggaggaucuccuuauauaguu

SEQ ID NO: 15984 - RNA, 21 nt, RNAi-antisense strand
cuauauaaggagauccuccuu

SEQ ID NO: 15985 - DNA, 21 bp, Homo sapiens
aagatttactagaaggtcaag

SEQ ID NO: 15986 - RNA, 21 nt, RNAi-sense strand
gauuuacuagaaggucaaguu

SEQ ID NO: 15987 - RNA, 21 nt, RNAi-antisense strand
cuugaccuucuaguaaaucuu

SEQ ID NO: 15988 - DNA, 21 bp, Homo sapiens
aaatgcctcagagctacaatt

SEQ ID NO: 15989 - RNA, 21 nt, RNAi-sense strand
augccucagagcuacaauuuu

SEQ ID NO: 15990 - RNA, 21 nt, RNAi-antisense strand
aauuguagcucugaggcauuu

SEQ ID NO: 15991 - DNA, 21 bp, Homo sapiens
aatgcctcagagctacaattt

SEQ ID NO: 15992 - RNA, 21 nt, RNAi-sense strand
ugccucagagcuacaauuuuu

SEQ ID NO: 15993 - RNA, 21 nt, RNAi-antisense strand
aaauuguagcucugaggcauu

SEQ ID NO: 15994 - DNA, 21 bp, Homo sapiens
aagctaaatctcaaagccttg

SEQ ID NO: 15995 - RNA, 21 nt, RNAi-sense strand
gcuaaaucucaaagccuuguu

SEQ ID NO: 15996 - RNA, 21 nt, RNAi-antisense strand
caaggcuuugagauuuagcuu

SEQ ID NO: 15997 - DNA, 21 bp, Homo sapiens
aaatctcaaagccttggtata

SEQ ID NO: 15998 - RNA, 21 nt, RNAi-sense strand
aucucaaagccuugguauauu

SEQ ID NO: 15999 - RNA, 21 nt, RNAi-antisense strand
uauaccaaggcuuugagauuu

SEQ ID NO: 16000 - DNA, 21 bp, Homo sapiens
aatctcaaagccttggtataa

SEQ ID NO: 16001 - RNA, 21 nt, RNAi-sense strand
ucucaaagccuugguauaauu

SEQ ID NO: 16002 - RNA, 21 nt, RNAi-antisense strand
uuauaccaaggcuuugagauu

SEQ ID NO: 16003 - DNA, 21 bp, Homo sapiens
aagcacacaccttctgaatag

SEQ ID NO: 16004 - RNA, 21 nt, RNAi-sense strand
gcacacaccuucugaauaguu

SEQ ID NO: 16005 - RNA, 21 nt, RNAi-antisense strand
cuauucagaaggugugugcuu

SEQ ID NO: 16006 - DNA, 21 bp, Homo sapiens
aaggcaaagtgaagatgacag

SEQ ID NO: 16007 - RNA, 21 nt, RNAi-sense strand
ggcaaagugaagaugacaguu

SEQ ID NO: 16008 - RNA, 21 nt, RNAi-antisense strand
cugucaucuucacuuugccuu

SEQ ID NO: 16009 - DNA, 21 bp, Homo sapiens
aaagtgaagatgacagtcctt

SEQ ID NO: 16010 - RNA, 21 nt, RNAi-sense strand
agugaagaugacaguccuuuu

SEQ ID NO: 16011 - RNA, 21 nt, RNAi-antisense strand
aaggacugucaucuucacuuu

SEQ ID NO: 16012 - DNA, 21 bp, Homo sapiens
aagtgaagatgacagtccttg

SEQ ID NO: 16013 - RNA, 21 nt, RNAi-sense strand
gugaagaugacaguccuuguu

SEQ ID NO: 16014 - RNA, 21 nt, RNAi-antisense strand
caaggacugucaucuucacuu

SEQ ID NO: 16015 - DNA, 21 bp, Homo sapiens
aagatgacagtccttgctctc

SEQ ID NO: 16016 - RNA, 21 nt, RNAi-sense strand
gaugacaguccuugcucucuu

SEQ ID NO: 16017 - RNA, 21 nt, RNAi-antisense strand
gagagcaaggacugucaucuu

SEQ ID NO: 16018 - DNA, 21 bp, Homo sapiens
aaactggtaattagactgtga

SEQ ID NO: 16019 - RNA, 21 nt, RNAi-sense strand
acugguaauuagacugugauu

SEQ ID NO: 16020 - RNA, 21 nt, RNAi-antisense strand
ucacagucuaauuaccaguuu

SEQ ID NO: 16021 - DNA, 21 bp, Homo sapiens
aactggtaattagactgtgat

SEQ ID NO: 16022 - RNA, 21 nt, RNAi-sense strand
cugguaauuagacugugauuu

SEQ ID NO: 16023 - RNA, 21 nt, RNAi-antisense strand
aucacagucuaauuaccaguu

SEQ ID NO: 16024 - DNA, 21 bp, Homo sapiens
aaaggctgttccaggtacagg

SEQ ID NO: 16025 - RNA, 21 nt, RNAi-sense strand
aggcuguuccagguacagguu

SEQ ID NO: 16026 - RNA, 21 nt, RNAi-antisense strand
ccuguaccuggaacagccuuu

SEQ ID NO: 16027 - DNA, 21 bp, Homo sapiens
aaggctgttccaggtacaggc

SEQ ID NO: 16028 - RNA, 21 nt, RNAi-sense strand
ggcuguuccagguacaggcuu

SEQ ID NO: 16029 - RNA, 21 nt, RNAi-antisense strand
gccuguaccuggaacagccuu

SEQ ID NO: 16030 - DNA, 21 bp, Homo sapiens
aactggcctggcaacttggat

SEQ ID NO: 16031 - RNA, 21 nt, RNAi-sense strand
cuggccuggcaacuuggauuu

SEQ ID NO: 16032 - RNA, 21 nt, RNAi-antisense strand
auccaaguugccaggccaguu

SEQ ID NO: 16033 - DNA, 21 bp, Homo sapiens
aacttggatacttggaacctt

SEQ ID NO: 16034 - RNA, 21 nt, RNAi-sense strand
cuuggauacuuggaaccuuuu

SEQ ID NO: 16035 - RNA, 21 nt, RNAi-antisense strand
aagguuccaaguauccaaguu

SEQ ID NO: 16036 - DNA, 21 bp, Homo sapiens
aagtgaatttaaccacaactg

SEQ ID NO: 16037 - RNA, 21 nt, RNAi-sense strand
gugaauuuaaccacaacuguu

SEQ ID NO: 16038 - RNA, 21 nt, RNAi-antisense strand
caguugugguuaaauucacuu

SEQ ID NO: 16039 - DNA, 21 bp, Homo sapiens
aatttaaccacaactgagacc

SEQ ID NO: 16040 - RNA, 21 nt, RNAi-sense strand
uuuaaccacaacugagaccuu

SEQ ID NO: 16041 - RNA, 21 nt, RNAi-antisense strand
ggucucaguugugguuaaauu

SEQ ID NO: 16042 - DNA, 21 bp, Homo sapiens
aaccacaactgagacctaaga

SEQ ID NO: 16043 - RNA, 21 nt, RNAi-sense strand
ccacaacugagaccuaagauu

SEQ ID NO: 16044 - RNA, 21 nt, RNAi-antisense strand
ucuuaggucucaguugugguu

SEQ ID NO: 16045 - DNA, 21 bp, Homo sapiens
aactgagacctaagaaattga

SEQ ID NO: 16046 - RNA, 21 nt, RNAi-sense strand
cugagaccuaagaaauugauu

SEQ ID NO: 16047 - RNA, 21 nt, RNAi-antisense strand
ucaauuucuuaggucucaguu

SEQ ID NO: 16048 - DNA, 21 bp, Homo sapiens
aaagatttcagagtacaggtc

SEQ ID NO: 16049 - RNA, 21 nt, RNAi-sense strand
agauuucagaguacaggucuu

SEQ ID NO: 16050 - RNA, 21 nt, RNAi-antisense strand
gaccuguacucugaaaucuuu

SEQ ID NO: 16051 - DNA, 21 bp, Homo sapiens
aagatttcagagtacaggtct

SEQ ID NO: 16052 - RNA, 21 nt, RNAi-sense strand
gauuucagaguacaggucuuu

SEQ ID NO: 16053 - RNA, 21 nt, RNAi-antisense strand
agaccuguacucugaaaucuu

SEQ ID NO: 16054 - DNA, 21 bp, Homo sapiens
aatcacagttcattgcagcct

SEQ ID NO: 16055 - RNA, 21 nt, RNAi-sense strand
ucacaguucauugcagccuuu

SEQ ID NO: 16056 - RNA, 21 nt, RNAi-antisense strand
aggcugcaaugaacugugauu

SEQ ID NO: 16057 - DNA, 21 bp, Homo sapiens
aaattattccttcagttggct

SEQ ID NO: 16058 - RNA, 21 nt, RNAi-sense strand
auuauuccuucaguuggcuuu

SEQ ID NO: 16059 - RNA, 21 nt, RNAi-antisense strand
agccaacugaaggaauaauuu

SEQ ID NO: 16060 - DNA, 21 bp, Homo sapiens
aattattccttcagttggcta

SEQ ID NO: 16061 - RNA, 21 nt, RNAi-sense strand
uuauuccuucaguuggcuauu

SEQ ID NO: 16062 - RNA, 21 nt, RNAi-antisense strand
uagccaacugaaggaauaauu

SEQ ID NO: 16063 - DNA, 21 bp, Homo sapiens
catggccagtacagtggtagc

SEQ ID NO: 16064 - RNA, 21 nt, RNAi-sense strand
uggccaguacagugguagcuu

SEQ ID NO: 16065 - RNA, 21 nt, RNAi-antisense strand
gcuaccacuguacuggccauu

SEQ ID NO: 16066 - DNA, 21 bp, Homo sapiens
cagtacagtggtagcagttgg

SEQ ID NO: 16067 - RNA, 21 nt, RNAi-sense strand
guacagugguagcaguugguu

SEQ ID NO: 16068 - RNA, 21 nt, RNAi-antisense strand
ccaacugcuaccacuguacuu

SEQ ID NO: 16069 - DNA, 21 bp, Homo sapiens
cagtggtagcagttggactga

SEQ ID NO: 16070 - RNA, 21 nt, RNAi-sense strand
gugguagcaguuggacugauu

SEQ ID NO: 16071 - RNA, 21 nt, RNAi-antisense strand
ucaguccaacugcuaccacuu

SEQ ID NO: 16072 - DNA, 21 bp, Homo sapiens
cagttggactgaccattgctg

SEQ ID NO: 16073 - RNA, 21 nt, RNAi-sense strand
guuggacugaccauugcuguu

SEQ ID NO: 16074 - RNA, 21 nt, RNAi-antisense strand
cagcaauggucaguccaacuu

SEQ ID NO: 16075 - DNA, 21 bp, Homo sapiens
cattgctgctgcaggatttgc

SEQ ID NO: 16076 - RNA, 21 nt, RNAi-sense strand
uugcugcugcaggauuugcuu

SEQ ID NO: 16077 - RNA, 21 nt, RNAi-antisense strand
gcaaauccugcagcagcaauu

SEQ ID NO: 16078 - DNA, 21 bp, Homo sapiens
caggatttgcaggccgttacg

SEQ ID NO: 16079 - RNA, 21 nt, RNAi-sense strand
ggauuugcaggccguuacguu

SEQ ID NO: 16080 - RNA, 21 nt, RNAi-antisense strand
cguaacggccugcaaauccuu

SEQ ID NO: 16081 - DNA, 21 bp, Homo sapiens
caagccatgaagcatatggag

SEQ ID NO: 16082 - RNA, 21 nt, RNAi-sense strand
agccaugaagcauauggaguu

SEQ ID NO: 16083 - RNA, 21 nt, RNAi-antisense strand
cuccauaugcuucauggcuuu

SEQ ID NO: 16084 - DNA, 21 bp, Homo sapiens
catgaagcatatggagcctca

SEQ ID NO: 16085 - RNA, 21 nt, RNAi-sense strand
ugaagcauauggagccucauu

SEQ ID NO: 16086 - RNA, 21 nt, RNAi-antisense strand
ugaggcuccauaugcuucauu

SEQ ID NO: 16087 - DNA, 21 bp, Homo sapiens
catcctgacaaaggaggatct

SEQ ID NO: 16088 - RNA, 21 nt, RNAi-sense strand
uccugacaaaggaggaucuuu

SEQ ID NO: 16089 - RNA, 21 nt, RNAi-antisense strand
agauccuccuuugucaggauu

SEQ ID NO: 16090 - DNA, 21 bp, Homo sapiens
caaaggaggatctccttatat

SEQ ID NO: 16091 - RNA, 21 nt, RNAi-sense strand
aaggaggaucuccuuauauuu

SEQ ID NO: 16092 - RNA, 21 nt, RNAi-antisense strand
auauaaggagauccuccuuuu

SEQ ID NO: 16093 - DNA, 21 bp, Homo sapiens
cacaagctaaatctcaaagcc

SEQ ID NO: 16094 - RNA, 21 nt, RNAi-sense strand
caagcuaaaucucaaagccuu

SEQ ID NO: 16095 - RNA, 21 nt, RNAi-antisense strand
ggcuuugagauuuagcuuguu

SEQ ID NO: 16096 - DNA, 21 bp, Homo sapiens
caagctaaatctcaaagcctt

SEQ ID NO: 16097 - RNA, 21 nt, RNAi-sense strand
agcuaaaucucaaagccuuuu

SEQ ID NO: 16098 - RNA, 21 nt, RNAi-antisense strand
aaggcuuugagauuuagcuuu

SEQ ID NO: 16099 - DNA, 21 bp, Homo sapiens
caagcacacaccttctgaata

SEQ ID NO: 16100 - RNA, 21 nt, RNAi-sense strand
agcacacaccuucugaauauu

SEQ ID NO: 16101 - RNA, 21 nt, RNAi-antisense strand
uauucagaaggugugugcuuu

SEQ ID NO: 16102 - DNA, 21 bp, Homo sapiens
cacacaccttctgaatagaaa

SEQ ID NO: 16103 - RNA, 21 nt, RNAi-sense strand
cacaccuucugaauagaaauu

SEQ ID NO: 16104 - RNA, 21 nt, RNAi-antisense strand
uuucuauucagaagguguguu

SEQ ID NO: 16105 - DNA, 21 bp, Homo sapiens
cacaccttctgaatagaaata

SEQ ID NO: 16106 - RNA, 21 nt, RNAi-sense strand
caccuucugaauagaaauauu

SEQ ID NO: 16107 - RNA, 21 nt, RNAi-antisense strand
uauuucuauucagaagguguu

SEQ ID NO: 16108 - DNA, 21 bp, Homo sapiens
caaggcaaagtgaagatgaca

SEQ ID NO: 16109 - RNA, 21 nt, RNAi-sense strand
aggcaaagugaagaugacauu

SEQ ID NO: 16110 - RNA, 21 nt, RNAi-antisense strand
ugucaucuucacuuugccuuu

SEQ ID NO: 16111 - DNA, 21 bp, Homo sapiens
caaagtgaagatgacagtcct

SEQ ID NO: 16112 - RNA, 21 nt, RNAi-sense strand
aagugaagaugacaguccuuu

SEQ ID NO: 16113 - RNA, 21 nt, RNAi-antisense strand
aggacugucaucuucacuuuu

SEQ ID NO: 16114 - DNA, 21 bp, Homo sapiens
caggtacaggcaactggcctg

SEQ ID NO: 16115 - RNA, 21 nt, RNAi-sense strand
gguacaggcaacuggccuguu

SEQ ID NO: 16116 - RNA, 21 nt, RNAi-antisense strand
caggccaguugccuguaccuu

SEQ ID NO: 16117 - DNA, 21 bp, Homo sapiens
caggcaactggcctggcaact

SEQ ID NO: 16118 - RNA, 21 nt, RNAi-sense strand
ggcaacuggccuggcaacuuu

SEQ ID NO: 16119 - RNA, 21 nt, RNAi-antisense strand
aguugccaggccaguugccuu

SEQ ID NO: 16120 - DNA, 21 bp, Homo sapiens
caactggcctggcaacttgga

SEQ ID NO: 16121 - RNA, 21 nt, RNAi-sense strand
acuggccuggcaacuuggauu

SEQ ID NO: 16122 - RNA, 21 nt, RNAi-antisense strand
uccaaguugccaggccaguuu

SEQ ID NO: 16123 - DNA, 21 bp, Homo sapiens
caacttggatacttggaacct

SEQ ID NO: 16124 - RNA, 21 nt, RNAi-sense strand
acuuggauacuuggaaccuuu

SEQ ID NO: 16125 - RNA, 21 nt, RNAi-antisense strand
agguuccaaguauccaaguuu

SEQ ID NO: 16126 - DNA, 21 bp, Homo sapiens
cacaactgagacctaagaaat

SEQ ID NO: 16127 - RNA, 21 nt, RNAi-sense strand
caacugagaccuaagaaauuu

SEQ ID NO: 16128 - RNA, 21 nt, RNAi-antisense strand
auuucuuaggucucaguuguu

SEQ ID NO: 16129 - DNA, 21 bp, Homo sapiens
caactgagacctaagaaattg

SEQ ID NO: 16130 - RNA, 21 nt, RNAi-sense strand
acugagaccuaagaaauuguu

SEQ ID NO: 16131 - RNA, 21 nt, RNAi-antisense strand
caauuucuuaggucucaguuu

SEQ ID NO: 16132 - DNA, 21 bp, Homo sapiens
cagagtacaggtctggtacaa

SEQ ID NO: 16133 - RNA, 21 nt, RNAi-sense strand
gaguacaggucugguacaauu

SEQ ID NO: 16134 - RNA, 21 nt, RNAi-antisense strand
uuguaccagaccuguacucuu

SEQ ID NO: 16135 - DNA, 21 bp, Homo sapiens
caggtctggtacaatcacagt

SEQ ID NO: 16136 - RNA, 21 nt, RNAi-sense strand
ggucugguacaaucacaguuu

SEQ ID NO: 16137 - RNA, 21 nt, RNAi-antisense strand
acugugauuguaccagaccuu

SEQ ID NO: 16138 - DNA, 21 bp, Homo sapiens
caatcacagttcattgcagcc

SEQ ID NO: 16139 - RNA, 21 nt, RNAi-sense strand
aucacaguucauugcagccuu

SEQ ID NO: 16140 - RNA, 21 nt, RNAi-antisense strand
ggcugcaaugaacugugauuu

SEQ ID NO: 16141 - DNA, 21 bp, Homo sapiens
cacagttcattgcagcctcaa

SEQ ID NO: 16142 - RNA, 21 nt, RNAi-sense strand
caguucauugcagccucaauu

SEQ ID NO: 16143 - RNA, 21 nt, RNAi-antisense strand
uugaggcugcaaugaacuguu

SEQ ID NO: 16144 - DNA, 21 bp, Homo sapiens
cagttcattgcagcctcaacc

SEQ ID NO: 16145 - RNA, 21 nt, RNAi-sense strand
guucauugcagccucaaccuu

SEQ ID NO: 16146 - RNA, 21 nt, RNAi-antisense strand
gguugaggcugcaaugaacuu

SEQ ID NO: 16147 - DNA, 21 bp, Homo sapiens
cattgcagcctcaacctcctg

SEQ ID NO: 16148 - RNA, 21 nt, RNAi-sense strand
uugcagccucaaccuccuguu

SEQ ID NO: 16149 - RNA, 21 nt, RNAi-antisense strand
caggagguugaggcugcaauu

SEQ ID NO: 16150 - DNA, 21 bp, Homo sapiens
caggcatgagtatttacattg

SEQ ID NO: 16151 - RNA, 21 nt, RNAi-sense strand
ggcaugaguauuuacauuguu

SEQ ID NO: 16152 - RNA, 21 nt, RNAi-antisense strand
caauguaaauacucaugccuu

SEQ ID NO: 16153 - DNA, 21 bp, Homo sapiens
cagttggctatttcttgacat

SEQ ID NO: 16154 - RNA, 21 nt, RNAi-sense strand
guuggcuauuucuugacauuu

SEQ ID NO: 16155 - RNA, 21 nt, RNAi-antisense strand
augucaagaaauagccaacuu

SEQ ID NO: 16156 - DNA, 21 bp, Homo sapiens
caaacttctgcaattgttatg

SEQ ID NO: 16157 - RNA, 21 nt, RNAi-sense strand
aacuucugcaauuguuauguu

SEQ ID NO: 16158 - RNA, 21 nt, RNAi-antisense strand
cauaacaauugcagaaguuuu

SEQ ID NO: 16159 - DNA, 21 bp, Homo sapiens
gagccatggccagtacagtgg

SEQ ID NO: 16160 - RNA, 21 nt, RNAi-sense strand
gccauggccaguacagugguu

SEQ ID NO: 16161 - RNA, 21 nt, RNAi-antisense strand
ccacuguacuggccauggcuu

SEQ ID NO: 16162 - DNA, 21 bp, Homo sapiens
gactgaccattgctgctgcag

SEQ ID NO: 16163 - RNA, 21 nt, RNAi-sense strand
cugaccauugcugcugcaguu

SEQ ID NO: 16164 - RNA, 21 nt, RNAi-antisense strand
cugcagcagcaauggucaguu

SEQ ID NO: 16165 - DNA, 21 bp, Homo sapiens
gaccattgctgctgcaggatt

SEQ ID NO: 16166 - RNA, 21 nt, RNAi-sense strand
ccauugcugcugcaggauuuu

SEQ ID NO: 16167 - RNA, 21 nt, RNAi-antisense strand
aauccugcagcagcaaugguu

SEQ ID NO: 16168 - DNA, 21 bp, Homo sapiens
gatttgcaggccgttacgttt

SEQ ID NO: 16169 - RNA, 21 nt, RNAi-sense strand
uuugcaggccguuacguuuuu

SEQ ID NO: 16170 - RNA, 21 nt, RNAi-antisense strand
aaacguaacggccugcaaauu

SEQ ID NO: 16171 - DNA, 21 bp, Homo sapiens
gaagcatatggagcctcaagt

SEQ ID NO: 16172 - RNA, 21 nt, RNAi-sense strand
agcauauggagccucaaguuu

SEQ ID NO: 16173 - RNA, 21 nt, RNAi-antisense strand
acuugaggcuccauaugcuuu

SEQ ID NO: 16174 - DNA, 21 bp, Homo sapiens
gagatgctcatcgacgaatta

SEQ ID NO: 16175 - RNA, 21 nt, RNAi-sense strand
gaugcucaucgacgaauuauu

SEQ ID NO: 16176 - RNA, 21 nt, RNAi-antisense strand
uaauucgucgaugagcaucuu

SEQ ID NO: 16177 - DNA, 21 bp, Homo sapiens
gatgctcatcgacgaattatg

SEQ ID NO: 16178 - RNA, 21 nt, RNAi-sense strand
ugcucaucgacgaauuauguu

SEQ ID NO: 16179 - RNA, 21 nt, RNAi-antisense strand
cauaauucgucgaugagcauu

SEQ ID NO: 16180 - DNA, 21 bp, Homo sapiens
gacaaaggaggatctccttat

SEQ ID NO: 16181 - RNA, 21 nt, RNAi-sense strand
caaaggaggaucuccuuauuu

SEQ ID NO: 16182 - RNA, 21 nt, RNAi-antisense strand
auaaggagauccuccuuuguu

SEQ ID NO: 16183 - DNA, 21 bp, Homo sapiens
gaggatctccttatatagcag

SEQ ID NO: 16184 - RNA, 21 nt, RNAi-sense strand
ggaucuccuuauauagcaguu

SEQ ID NO: 16185 - RNA, 21 nt, RNAi-antisense strand
cugcuauauaaggagauccuu

SEQ ID NO: 16186 - DNA, 21 bp, Homo sapiens
gatctccttatatagcagcca

SEQ ID NO: 16187 - RNA, 21 nt, RNAi-sense strand
ucuccuuauauagcagccauu

SEQ ID NO: 16188 - RNA, 21 nt, RNAi-antisense strand
uggcugcuauauaaggagauu

SEQ ID NO: 16189 - DNA, 21 bp, Homo sapiens
gatttactagaaggtcaagct

SEQ ID NO: 16190 - RNA, 21 nt, RNAi-sense strand
uuuacuagaaggucaagcuuu

SEQ ID NO: 16191 - RNA, 21 nt, RNAi-antisense strand
agcuugaccuucuaguaaauu

SEQ ID NO: 16192 - DNA, 21 bp, Homo sapiens
gatttagcacaagctaaatct

SEQ ID NO: 16193 - RNA, 21 nt, RNAi-sense strand
uuuagcacaagcuaaaucuuu

SEQ ID NO: 16194 - RNA, 21 nt, RNAi-antisense strand
agauuuagcuugugcuaaauu

SEQ ID NO: 16195 - DNA, 21 bp, Homo sapiens
gaagatgacagtccttgctct

SEQ ID NO: 16196 - RNA, 21 nt, RNAi-sense strand
agaugacaguccuugcucuuu

SEQ ID NO: 16197 - RNA, 21 nt, RNAi-antisense strand
agagcaaggacugucaucuuu

SEQ ID NO: 16198 - DNA, 21 bp, Homo sapiens
gatgacagtccttgctctcag

SEQ ID NO: 16199 - RNA, 21 nt, RNAi-sense strand
ugacaguccuugcucucaguu

SEQ ID NO: 16200 - RNA, 21 nt, RNAi-antisense strand
cugagagcaaggacugucauu

SEQ ID NO: 16201 - DNA, 21 bp, Homo sapiens
gagactgataaactggtaatt

SEQ ID NO: 16202 - RNA, 21 nt, RNAi-sense strand
gacugauaaacugguaauuuu

SEQ ID NO: 16203 - RNA, 21 nt, RNAi-antisense strand
aauuaccaguuuaucagucuu

SEQ ID NO: 16204 - DNA, 21 bp, Homo sapiens
gactgataaactggtaattag

SEQ ID NO: 16205 - RNA, 21 nt, RNAi-sense strand
cugauaaacugguaauuaguu

SEQ ID NO: 16206 - RNA, 21 nt, RNAi-antisense strand
cuaauuaccaguuuaucaguu

SEQ ID NO: 16207 - DNA, 21 bp, Homo sapiens
gataaactggtaattagactg

SEQ ID NO: 16208 - RNA, 21 nt, RNAi-sense strand
uaaacugguaauuagacuguu

SEQ ID NO: 16209 - RNA, 21 nt, RNAi-antisense strand
cagucuaauuaccaguuuauu

SEQ ID NO: 16210 - DNA, 21 bp, Homo sapiens
gatggaaattagcttaagctg

SEQ ID NO: 16211 - RNA, 21 nt, RNAi-sense strand
uggaaauuagcuuaagcuguu

SEQ ID NO: 16212 - RNA, 21 nt, RNAi-antisense strand
cagcuuaagcuaauuuccauu

SEQ ID NO: 16213 - DNA, 21 bp, Homo sapiens
gactcttcttattcggtggaa

SEQ ID NO: 16214 - RNA, 21 nt, RNAi-sense strand
cucuucuuauucgguggaauu

SEQ ID NO: 16215 - RNA, 21 nt, RNAi-antisense strand
uuccaccgaauaagaagaguu

SEQ ID NO: 16216 - DNA, 21 bp, Homo sapiens
gaaaggctgttccaggtacag

SEQ ID NO: 16217 - RNA, 21 nt, RNAi-sense strand
aaggcuguuccagguacaguu

SEQ ID NO: 16218 - RNA, 21 nt, RNAi-antisense strand
cuguaccuggaacagccuuuu

SEQ ID NO: 16219 - DNA, 21 bp, Homo sapiens
gatacttggaaccttgtattt

SEQ ID NO: 16220 - RNA, 21 nt, RNAi-sense strand
uacuuggaaccuuguauuuuu

SEQ ID NO: 16221 - RNA, 21 nt, RNAi-antisense strand
aaauacaagguuccaaguauu

SEQ ID NO: 16222 - DNA, 21 bp, Homo sapiens
gaatttaaccacaactgagac

SEQ ID NO: 16223 - RNA, 21 nt, RNAi-sense strand
auuuaaccacaacugagacuu

SEQ ID NO: 16224 - RNA, 21 nt, RNAi-antisense strand
gucucaguugugguuaaauuu

SEQ ID NO: 16225 - DNA, 21 bp, Homo sapiens
gagacctaagaaattgaccta

SEQ ID NO: 16226 - RNA, 21 nt, RNAi-sense strand
gaccuaagaaauugaccuauu

SEQ ID NO: 16227 - RNA, 21 nt, RNAi-antisense strand
uaggucaauuucuuaggucuu

SEQ ID NO: 16228 - DNA, 21 bp, Homo sapiens
gacctaagaaattgacctagg

SEQ ID NO: 16229 - RNA, 21 nt, RNAi-sense strand
ccuaagaaauugaccuagguu

SEQ ID NO: 16230 - RNA, 21 nt, RNAi-antisense strand
ccuaggucaauuucuuagguu

SEQ ID NO: 16231 - DNA, 21 bp, Homo sapiens
gataaagatttcagagtacag

SEQ ID NO: 16232 - RNA, 21 nt, RNAi-sense strand
uaaagauuucagaguacaguu

SEQ ID NO: 16233 - RNA, 21 nt, RNAi-antisense strand
cuguacucugaaaucuuuauu

SEQ ID NO: 16234 - DNA, 21 bp, Homo sapiens
gatttcagagtacaggtctgg

SEQ ID NO: 16235 - RNA, 21 nt, RNAi-sense strand
uuucagaguacaggucugguu

SEQ ID NO: 16236 - RNA, 21 nt, RNAi-antisense strand
ccagaccuguacucugaaauu

SEQ ID NO: 16237 - DNA, 21 bp, Homo sapiens
gagtacaggtctggtacaatc

SEQ ID NO: 16238 - RNA, 21 nt, RNAi-sense strand
guacaggucugguacaaucuu

SEQ ID NO: 16239 - RNA, 21 nt, RNAi-antisense strand
gauuguaccagaccuguacuu

SEQ ID NO: 16240 - DNA, 21 bp, Homo sapiens
gattacaggcatgagtattta

SEQ ID NO: 16241 - RNA, 21 nt, RNAi-sense strand
uuacaggcaugaguauuuauu

SEQ ID NO: 16242 - RNA, 21 nt, RNAi-antisense strand
uaaauacucaugccuguaauu

SEQ ID NO: 16243 - DNA, 21 bp, Homo sapiens
gacataatcaaacttctgcaa

SEQ ID NO: 16244 - RNA, 21 nt, RNAi-sense strand
cauaaucaaacuucugcaauu

SEQ ID NO: 16245 - RNA, 21 nt, RNAi-antisense strand
uugcagaaguuugauuauguu

SEQ ID NO: 16246 - DNA, 21 bp, Homo sapiens
taaaggcgtgcaggtgttggc

SEQ ID NO: 16247 - RNA, 21 nt, RNAi-sense strand
aaggcgugcagguguuggcuu

SEQ ID NO: 16248 - RNA, 21 nt, RNAi-antisense strand
gccaacaccugcacgccuuuu

SEQ ID NO: 16249 - DNA, 21 bp, Homo sapiens
tacagtggtagcagttggact

SEQ ID NO: 16250 - RNA, 21 nt, RNAi-sense strand
cagugguagcaguuggacuuu

SEQ ID NO: 16251 - RNA, 21 nt, RNAi-antisense strand
aguccaacugcuaccacuguu

SEQ ID NO: 16252 - DNA, 21 bp, Homo sapiens
tagcagttggactgaccattg

SEQ ID NO: 16253 - RNA, 21 nt, RNAi-sense strand
gcaguuggacugaccauuguu

SEQ ID NO: 16254 - RNA, 21 nt, RNAi-antisense strand
caauggucaguccaacugcuu

SEQ ID NO: 16255 - DNA, 21 bp, Homo sapiens
taagagatgctcatcgacgaa

SEQ ID NO: 16256 - RNA, 21 nt, RNAi-sense strand
agagaugcucaucgacgaauu

SEQ ID NO: 16257 - RNA, 21 nt, RNAi-antisense strand
uucgucgaugagcaucucuuu

SEQ ID NO: 16258 - DNA, 21 bp, Homo sapiens
taaatcatcctgacaaaggag

SEQ ID NO: 16259 - RNA, 21 nt, RNAi-sense strand
aaucauccugacaaaggaguu

SEQ ID NO: 16260 - RNA, 21 nt, RNAi-antisense strand
cuccuuugucaggaugauuuu

SEQ ID NO: 16261 - DNA, 21 bp, Homo sapiens
tagcacaagctaaatctcaaa

SEQ ID NO: 16262 - RNA, 21 nt, RNAi-sense strand
gcacaagcuaaaucucaaauu

SEQ ID NO: 16263 - RNA, 21 nt, RNAi-antisense strand
uuugagauuuagcuugugcuu

SEQ ID NO: 16264 - DNA, 21 bp, Homo sapiens
taaatctcaaagccttggtat

SEQ ID NO: 16265 - RNA, 21 nt, RNAi-sense strand
aaucucaaagccuugguauuu

SEQ ID NO: 16266 - RNA, 21 nt, RNAi-antisense strand
auaccaaggcuuugagauuuu

SEQ ID NO: 16267 - DNA, 21 bp, Homo sapiens
taaactggtaattagactgtg

SEQ ID NO: 16268 - RNA, 21 nt, RNAi-sense strand
aacugguaauuagacuguguu

SEQ ID NO: 16269 - RNA, 21 nt, RNAi-antisense strand
cacagucuaauuaccaguuuu

SEQ ID NO: 16270 - DNA, 21 bp, Homo sapiens
tagcttaagctgtttaagtag

SEQ ID NO: 16271 - RNA, 21 nt, RNAi-sense strand
gcuuaagcuguuuaaguaguu

SEQ ID NO: 16272 - RNA, 21 nt, RNAi-antisense strand
cuacuuaaacagcuuaagcuu

SEQ ID NO: 16273 - DNA, 21 bp, Homo sapiens
tattcggtggaaaggctgttc

SEQ ID NO: 16274 - RNA, 21 nt, RNAi-sense strand
uucgguggaaaggcuguucuu

SEQ ID NO: 16275 - RNA, 21 nt, RNAi-antisense strand
gaacagccuuuccaccgaauu

SEQ ID NO: 16276 - DNA, 21 bp, Homo sapiens
tacaggcaactggcctggcaa

SEQ ID NO: 16277 - RNA, 21 nt, RNAi-sense strand
caggcaacuggccuggcaauu

SEQ ID NO: 16278 - RNA, 21 nt, RNAi-antisense strand
uugccaggccaguugccuguu

SEQ ID NO: 16279 - DNA, 21 bp, Homo sapiens
taaccacaactgagacctaag

SEQ ID NO: 16280 - RNA, 21 nt, RNAi-sense strand
accacaacugagaccuaaguu

SEQ ID NO: 16281 - RNA, 21 nt, RNAi-antisense strand
cuuaggucucaguugugguuu

SEQ ID NO: 16282 - DNA, 21 bp, Homo sapiens
taaagatttcagagtacaggt

SEQ ID NO: 16283 - RNA, 21 nt, RNAi-sense strand
aagauuucagaguacagguuu

SEQ ID NO: 16284 - RNA, 21 nt, RNAi-antisense strand
accuguacucugaaaucuuuu

SEQ ID NO: 16285 - DNA, 21 bp, Homo sapiens
tacaggtctggtacaatcaca

SEQ ID NO: 16286 - RNA, 21 nt, RNAi-sense strand
caggucugguacaaucacauu

SEQ ID NO: 16287 - RNA, 21 nt, RNAi-antisense strand
ugugauuguaccagaccuguu

SEQ ID NO: 16288 - DNA, 21 bp, Homo sapiens
tacaatcacagttcattgcag

SEQ ID NO: 16289 - RNA, 21 nt, RNAi-sense strand
caaucacaguucauugcaguu

SEQ ID NO: 16290 - RNA, 21 nt, RNAi-antisense strand
cugcaaugaacugugauuguu

SEQ ID NO: 16291 - DNA, 21 bp, Homo sapiens
tacaggcatgagtatttacat

SEQ ID NO: 16292 - RNA, 21 nt, RNAi-sense strand
caggcaugaguauuuacauuu

SEQ ID NO: 16293 - RNA, 21 nt, RNAi-antisense strand
auguaaauacucaugccuguu

SEQ ID NO: 16294 - DNA, 21 bp, Homo sapiens
taaattattccttcagttggc

SEQ ID NO: 16295 - RNA, 21 nt, RNAi-sense strand
aauuauuccuucaguuggcuu

SEQ ID NO: 16296 - RNA, 21 nt, RNAi-antisense strand
gccaacugaaggaauaauuuu

SEQ ID NO: 16297 - DNA, 21 bp, Homo sapiens
tattccttcagttggctattt

SEQ ID NO: 16298 - RNA, 21 nt, RNAi-sense strand
uuccuucaguuggcuauuuuu

SEQ ID NO: 16299 - RNA, 21 nt, RNAi-antisense strand
aaauagccaacugaaggaauu

SEQ ID NO: 16300 - DNA, 21 bp, Homo sapiens
aaaggcgtgcaggtgttggcc

SEQ ID NO: 16301 - RNA, 21 nt, RNAi-sense strand
aggcgugcagguguuggccuu

SEQ ID NO: 16302 - RNA, 21 nt, RNAi-antisense strand
ggccaacaccugcacgccuuu

SEQ ID NO: 16303 - DNA, 21 bp, Homo sapiens
aagccatgaagcatatggagc

SEQ ID NO: 16304 - RNA, 21 nt, RNAi-sense strand
gccaugaagcauauggagcuu

SEQ ID NO: 16305 - RNA, 21 nt, RNAi-antisense strand
gcuccauaugcuucauggcuu

SEQ ID NO: 16306 - DNA, 21 bp, Homo sapiens
aagcatatggagcctcaagta

SEQ ID NO: 16307 - RNA, 21 nt, RNAi-sense strand
gcauauggagccucaaguauu

SEQ ID NO: 16308 - RNA, 21 nt, RNAi-antisense strand
uacuugaggcuccauaugcuu

SEQ ID NO: 16309 - DNA, 21 bp, Homo sapiens
aaatctgccttcagtggtggc

SEQ ID NO: 16310 - RNA, 21 nt, RNAi-sense strand
aucugccuucagugguggcuu

SEQ ID NO: 16311 - RNA, 21 nt, RNAi-antisense strand
gccaccacugaaggcagauuu

SEQ ID NO: 16312 - DNA, 21 bp, Homo sapiens
aatctgccttcagtggtggct

SEQ ID NO: 16313 - RNA, 21 nt, RNAi-sense strand
ucugccuucagugguggcuuu

SEQ ID NO: 16314 - RNA, 21 nt, RNAi-antisense strand
agccaccacugaaggcagauu

SEQ ID NO: 16315 - DNA, 21 bp, Homo sapiens
aaataagagatgctcatcgac

SEQ ID NO: 16316 - RNA, 21 nt, RNAi-sense strand
auaagagaugcucaucgacuu

SEQ ID NO: 16317 - RNA, 21 nt, RNAi-antisense strand
gucgaugagcaucucuuauuu

SEQ ID NO: 16318 - DNA, 21 bp, Homo sapiens
aataagagatgctcatcgacg

SEQ ID NO: 16319 - RNA, 21 nt, RNAi-sense strand
uaagagaugcucaucgacguu

SEQ ID NO: 16320 - RNA, 21 nt, RNAi-antisense strand
cgucgaugagcaucucuuauu

SEQ ID NO: 16321 - DNA, 21 bp, Homo sapiens
aagagatgctcatcgacgaat

SEQ ID NO: 16322 - RNA, 21 nt, RNAi-sense strand
gagaugcucaucgacgaauuu

SEQ ID NO: 16323 - RNA, 21 nt, RNAi-antisense strand
auucgucgaugagcaucucuu

SEQ ID NO: 16324 - DNA, 21 bp, Homo sapiens
aaatcatcctgacaaaggagg

SEQ ID NO: 16325 - RNA, 21 nt, RNAi-sense strand
aucauccugacaaaggagguu

SEQ ID NO: 16326 - RNA, 21 nt, RNAi-antisense strand
ccuccuuugucaggaugauuu

SEQ ID NO: 16327 - DNA, 21 bp, Homo sapiens
aatcatcctgacaaaggagga

SEQ ID NO: 16328 - RNA, 21 nt, RNAi-sense strand
ucauccugacaaaggaggauu

SEQ ID NO: 16329 - RNA, 21 nt, RNAi-antisense strand
uccuccuuugucaggaugauu

SEQ ID NO: 16330 - DNA, 21 bp, Homo sapiens
aaaggaggatctccttatata

SEQ ID NO: 16331 - RNA, 21 nt, RNAi-sense strand
aggaggaucuccuuauauauu

SEQ ID NO: 16332 - RNA, 21 nt, RNAi-antisense strand
uauauaaggagauccuccuuu

SEQ ID NO: 16333 - DNA, 21 bp, Homo sapiens
aaggaggatctccttatatag

SEQ ID NO: 16334 - RNA, 21 nt, RNAi-sense strand
ggaggaucuccuuauauaguu

SEQ ID NO: 16335 - RNA, 21 nt, RNAi-antisense strand
cuauauaaggagauccuccuu

SEQ ID NO: 16336 - DNA, 21 bp, Homo sapiens
aagatttactagaaggtcaag

SEQ ID NO: 16337 - RNA, 21 nt, RNAi-sense strand
gauuuacuagaaggucaaguu

SEQ ID NO: 16338 - RNA, 21 nt, RNAi-antisense strand
cuugaccuucuaguaaaucuu

SEQ ID NO: 16339 - DNA, 21 bp, Homo sapiens
aaatgcctcagagctacaatt

SEQ ID NO: 16340 - RNA, 21 nt, RNAi-sense strand
augccucagagcuacaauuuu

SEQ ID NO: 16341 - RNA, 21 nt, RNAi-antisense strand
aauuguagcucugaggcauuu

SEQ ID NO: 16342 - DNA, 21 bp, Homo sapiens
aatgcctcagagctacaattt

SEQ ID NO: 16343 - RNA, 21 nt, RNAi-sense strand
ugccucagagcuacaauuuuu

SEQ ID NO: 16344 - RNA, 21 nt, RNAi-antisense strand
aaauuguagcucugaggcauu

SEQ ID NO: 16345 - DNA, 21 bp, Homo sapiens
aagctaaatctcaaagccttg

SEQ ID NO: 16346 - RNA, 21 nt, RNAi-sense strand
gcuaaaucucaaagccuuguu

SEQ ID NO: 16347 - RNA, 21 nt, RNAi-antisense strand
caaggcuuugagauuuagcuu

SEQ ID NO: 16348 - DNA, 21 bp, Homo sapiens
aaatctcaaagccttggtata

SEQ ID NO: 16349 - RNA, 21 nt, RNAi-sense strand
aucucaaagccuugguauauu

SEQ ID NO: 16350 - RNA, 21 nt, RNAi-antisense strand
uauaccaaggcuuugagauuu

SEQ ID NO: 16351 - DNA, 21 bp, Homo sapiens
aatctcaaagccttggtataa

SEQ ID NO: 16352 - RNA, 21 nt, RNAi-sense strand
ucucaaagccuugguauaauu

SEQ ID NO: 16353 - RNA, 21 nt, RNAi-antisense strand
uuauaccaaggcuuugagauu

SEQ ID NO: 16354 - DNA, 21 bp, Homo sapiens
aagcacacaccttctgaatag

SEQ ID NO: 16355 - RNA, 21 nt, RNAi-sense strand
gcacacaccuucugaauaguu

SEQ ID NO: 16356 - RNA, 21 nt, RNAi-antisense strand
cuauucagaaggugugugcuu

SEQ ID NO: 16357 - DNA, 21 bp, Homo sapiens
aaggcaaagtgaagatgacag

SEQ ID NO: 16358 - RNA, 21 nt, RNAi-sense strand
ggcaaagugaagaugacaguu

SEQ ID NO: 16359 - RNA, 21 nt, RNAi-antisense strand
cugucaucuucacuuugccuu

SEQ ID NO: 16360 - DNA, 21 bp, Homo sapiens
aaagtgaagatgacagtcctt

SEQ ID NO: 16361 - RNA, 21 nt, RNAi-sense strand
agugaagaugacaguccuuuu

SEQ ID NO: 16362 - RNA, 21 nt, RNAi-antisense strand
aaggacugucaucuucacuuu

SEQ ID NO: 16363 - DNA, 21 bp, Homo sapiens
aagtgaagatgacagtccttg

SEQ ID NO: 16364 - RNA, 21 nt, RNAi-sense strand
gugaagaugacaguccuuguu

SEQ ID NO: 16365 - RNA, 21 nt, RNAi-antisense strand
caaggacugucaucuucacuu

SEQ ID NO: 16366 - DNA, 21 bp, Homo sapiens
aagatgacagtccttgctctc

SEQ ID NO: 16367 - RNA, 21 nt, RNAi-sense strand
gaugacaguccuugcucucuu

SEQ ID NO: 16368 - RNA, 21 nt, RNAi-antisense strand
gagagcaaggacugucaucuu

SEQ ID NO: 16369 - DNA, 21 bp, Homo sapiens
aaactggtaattagactgtga

SEQ ID NO: 16370 - RNA, 21 nt, RNAi-sense strand
acugguaauuagacugugauu

SEQ ID NO: 16371 - RNA, 21 nt, RNAi-antisense strand
ucacagucuaauuaccaguuu

SEQ ID NO: 16372 - DNA, 21 bp, Homo sapiens
aactggtaattagactgtgat

SEQ ID NO: 16373 - RNA, 21 nt, RNAi-sense strand
cugguaauuagacugugauuu

SEQ ID NO: 16374 - RNA, 21 nt, RNAi-antisense strand
aucacagucuaauuaccaguu

SEQ ID NO: 16375 - DNA, 21 bp, Homo sapiens
aaaggctgttccaggtacagg

SEQ ID NO: 16376 - RNA, 21 nt, RNAi-sense strand
aggcuguuccagguacagguu

SEQ ID NO: 16377 - RNA, 21 nt, RNAi-antisense strand
ccuguaccuggaacagccuuu

SEQ ID NO: 16378 - DNA, 21 bp, Homo sapiens
aaggctgttccaggtacaggc

SEQ ID NO: 16379 - RNA, 21 nt, RNAi-sense strand
ggcuguuccagguacaggcuu

SEQ ID NO: 16380 - RNA, 21 nt, RNAi-antisense strand
gccuguaccuggaacagccuu

SEQ ID NO: 16381 - DNA, 21 bp, Homo sapiens
aactggcctggcaacttggat

SEQ ID NO: 16382 - RNA, 21 nt, RNAi-sense strand
cuggccuggcaacuuggauuu

SEQ ID NO: 16383 - RNA, 21 nt, RNAi-antisense strand
auccaaguugccaggccaguu

SEQ ID NO: 16384 - DNA, 21 bp, Homo sapiens
aacttggatacttggaacctt

SEQ ID NO: 16385 - RNA, 21 nt, RNAi-sense strand
cuuggauacuuggaaccuuuu

SEQ ID NO: 16386 - RNA, 21 nt, RNAi-antisense strand
aagguuccaaguauccaaguu

SEQ ID NO: 16387 - DNA, 21 bp, Homo sapiens
aagtgaatttaaccacaactg

SEQ ID NO: 16388 - RNA, 21 nt, RNAi-sense strand
gugaauuuaaccacaacuguu

SEQ ID NO: 16389 - RNA, 21 nt, RNAi-antisense strand
caguugugguuaaauucacuu

SEQ ID NO: 16390 - DNA, 21 bp, Homo sapiens
aatttaaccacaactgagacc

SEQ ID NO: 16391 - RNA, 21 nt, RNAi-sense strand
uuuaaccacaacugagaccuu

SEQ ID NO: 16392 - RNA, 21 nt, RNAi-antisense strand
ggucucaguugugguuaaauu

SEQ ID NO: 16393 - DNA, 21 bp, Homo sapiens
aaccacaactgagacctaaga

SEQ ID NO: 16394 - RNA, 21 nt, RNAi-sense strand
ccacaacugagaccuaagauu

SEQ ID NO: 16395 - RNA, 21 nt, RNAi-antisense strand
ucuuaggucucaguugugguu

SEQ ID NO: 16396 - DNA, 21 bp, Homo sapiens
aactgagacctaagaaattga

SEQ ID NO: 16397 - RNA, 21 nt, RNAi-sense strand
cugagaccuaagaaauugauu

SEQ ID NO: 16398 - RNA, 21 nt, RNAi-antisense strand
ucaauuucuuaggucucaguu

SEQ ID NO: 16399 - DNA, 21 bp, Homo sapiens
aaagatttcagagtacaggtc

SEQ ID NO: 16400 - RNA, 21 nt, RNAi-sense strand
agauuucagaguacaggucuu

SEQ ID NO: 16401 - RNA, 21 nt, RNAi-antisense strand
gaccuguacucugaaaucuuu

SEQ ID NO: 16402 - DNA, 21 bp, Homo sapiens
aagatttcagagtacaggtct

SEQ ID NO: 16403 - RNA, 21 nt, RNAi-sense strand
gauuucagaguacaggucuuu

SEQ ID NO: 16404 - RNA, 21 nt, RNAi-antisense strand
agaccuguacucugaaaucuu

SEQ ID NO: 16405 - DNA, 21 bp, Homo sapiens
aatcacagttcattgcagcct

SEQ ID NO: 16406 - RNA, 21 nt, RNAi-sense strand
ucacaguucauugcagccuuu

SEQ ID NO: 16407 - RNA, 21 nt, RNAi-antisense strand
aggcugcaaugaacugugauu

SEQ ID NO: 16408 - DNA, 21 bp, Homo sapiens
aaattattccttcagttggct

SEQ ID NO: 16409 - RNA, 21 nt, RNAi-sense strand
auuauuccuucaguuggcuuu

SEQ ID NO: 16410 - RNA, 21 nt, RNAi-antisense strand
agccaacugaaggaauaauuu

SEQ ID NO: 16411 - DNA, 21 bp, Homo sapiens
aattattccttcagttggcta

SEQ ID NO: 16412 - RNA, 21 nt, RNAi-sense strand
uuauuccuucaguuggcuauu

SEQ ID NO: 16413 - RNA, 21 nt, RNAi-antisense strand
uagccaacugaaggaauaauu

SEQ ID NO: 16414 - DNA, 21 bp, Homo sapiens
catggccagtacagtggtagc

SEQ ID NO: 16415 - RNA, 21 nt, RNAi-sense strand
uggccaguacagugguagcuu

SEQ ID NO: 16416 - RNA, 21 nt, RNAi-antisense strand
gcuaccacuguacuggccauu

SEQ ID NO: 16417 - DNA, 21 bp, Homo sapiens
cagtacagtggtagcagttgg

SEQ ID NO: 16418 - RNA, 21 nt, RNAi-sense strand
guacagugguagcaguugguu

SEQ ID NO: 16419 - RNA, 21 nt, RNAi-antisense strand
ccaacugcuaccacuguacuu

SEQ ID NO: 16420 - DNA, 21 bp, Homo sapiens
cagtggtagcagttggactga

SEQ ID NO: 16421 - RNA, 21 nt, RNAi-sense strand
gugguagcaguuggacugauu

SEQ ID NO: 16422 - RNA, 21 nt, RNAi-antisense strand
ucaguccaacugcuaccacuu

SEQ ID NO: 16423 - DNA, 21 bp, Homo sapiens
cagttggactgaccattgctg

SEQ ID NO: 16424 - RNA, 21 nt, RNAi-sense strand
guuggacugaccauugcuguu

SEQ ID NO: 16425 - RNA, 21 nt, RNAi-antisense strand
cagcaauggucaguccaacuu

SEQ ID NO: 16426 - DNA, 21 bp, Homo sapiens
cattgctgctgcaggatttgc

SEQ ID NO: 16427 - RNA, 21 nt, RNAi-sense strand
uugcugcugcaggauuugcuu

SEQ ID NO: 16428 - RNA, 21 nt, RNAi-antisense strand
gcaaauccugcagcagcaauu

SEQ ID NO: 16429 - DNA, 21 bp, Homo sapiens
caggatttgcaggccgttacg

SEQ ID NO: 16430 - RNA, 21 nt, RNAi-sense strand
ggauuugcaggccguuacguu

SEQ ID NO: 16431 - RNA, 21 nt, RNAi-antisense strand
cguaacggccugcaaauccuu

SEQ ID NO: 16432 - DNA, 21 bp, Homo sapiens
caagccatgaagcatatggag

SEQ ID NO: 16433 - RNA, 21 nt, RNAi-sense strand
agccaugaagcauauggaguu

SEQ ID NO: 16434 - RNA, 21 nt, RNAi-antisense strand
cuccauaugcuucauggcuuu

SEQ ID NO: 16435 - DNA, 21 bp, Homo sapiens
catgaagcatatggagcctca

SEQ ID NO: 16436 - RNA, 21 nt, RNAi-sense strand
ugaagcauauggagccucauu

SEQ ID NO: 16437 - RNA, 21 nt, RNAi-antisense strand
ugaggcuccauaugcuucauu

SEQ ID NO: 16438 - DNA, 21 bp, Homo sapiens
cagtggtggctattatagagc

SEQ ID NO: 16439 - RNA, 21 nt, RNAi-sense strand
gugguggcuauuauagagcuu

SEQ ID NO: 16440 - RNA, 21 nt, RNAi-antisense strand
gcucuauaauagccaccacuu

SEQ ID NO: 16441 - DNA, 21 bp, Homo sapiens
catcctgacaaaggaggatct

SEQ ID NO: 16442 - RNA, 21 nt, RNAi-sense strand
uccugacaaaggaggaucuuu

SEQ ID NO: 16443 - RNA, 21 nt, RNAi-antisense strand
agauccuccuuugucaggauu

SEQ ID NO: 16444 - DNA, 21 bp, Homo sapiens
caaaggaggatctccttatat

SEQ ID NO: 16445 - RNA, 21 nt, RNAi-sense strand
aaggaggaucuccuuauauuu

SEQ ID NO: 16446 - RNA, 21 nt, RNAi-antisense strand
auauaaggagauccuccuuuu

SEQ ID NO: 16447 - DNA, 21 bp, Homo sapiens
cacaagctaaatctcaaagcc

SEQ ID NO: 16448 - RNA, 21 nt, RNAi-sense strand
caagcuaaaucucaaagccuu

SEQ ID NO: 16449 - RNA, 21 nt, RNAi-antisense strand
ggcuuugagauuuagcuuguu

SEQ ID NO: 16450 - DNA, 21 bp, Homo sapiens
caagctaaatctcaaagcctt

SEQ ID NO: 16451 - RNA, 21 nt, RNAi-sense strand
agcuaaaucucaaagccuuuu

SEQ ID NO: 16452 - RNA, 21 nt, RNAi-antisense strand
aaggcuuugagauuuagcuuu

SEQ ID NO: 16453 - DNA, 21 bp, Homo sapiens
caagcacacaccttctgaata

SEQ ID NO: 16454 - RNA, 21 nt, RNAi-sense strand
agcacacaccuucugaauauu

SEQ ID NO: 16455 - RNA, 21 nt, RNAi-antisense strand
uauucagaaggugugugcuuu

SEQ ID NO: 16456 - DNA, 21 bp, Homo sapiens
cacacaccttctgaatagaaa

SEQ ID NO: 16457 - RNA, 21 nt, RNAi-sense strand
cacaccuucugaauagaaauu

SEQ ID NO: 16458 - RNA, 21 nt, RNAi-antisense strand
uuucuauucagaagguguguu

SEQ ID NO: 16459 - DNA, 21 bp, Homo sapiens
cacaccttctgaatagaaata

SEQ ID NO: 16460 - RNA, 21 nt, RNAi-sense strand
caccuucugaauagaaauauu

SEQ ID NO: 16461 - RNA, 21 nt, RNAi-antisense strand
uauuucuauucagaagguguu

SEQ ID NO: 16462 - DNA, 21 bp, Homo sapiens
caaggcaaagtgaagatgaca

SEQ ID NO: 16463 - RNA, 21 nt, RNAi-sense strand
aggcaaagugaagaugacauu

SEQ ID NO: 16464 - RNA, 21 nt, RNAi-antisense strand
ugucaucuucacuuugccuuu

SEQ ID NO: 16465 - DNA, 21 bp, Homo sapiens
caaagtgaagatgacagtcct

SEQ ID NO: 16466 - RNA, 21 nt, RNAi-sense strand
aagugaagaugacaguccuuu

SEQ ID NO: 16467 - RNA, 21 nt, RNAi-antisense strand
aggacugucaucuucacuuuu

SEQ ID NO: 16468 - DNA, 21 bp, Homo sapiens
caggtacaggcaactggcctg

SEQ ID NO: 16469 - RNA, 21 nt, RNAi-sense strand
gguacaggcaacuggccuguu

SEQ ID NO: 16470 - RNA, 21 nt, RNAi-antisense strand
caggccaguugccuguaccuu

SEQ ID NO: 16471 - DNA, 21 bp, Homo sapiens
caggcaactggcctggcaact

SEQ ID NO: 16472 - RNA, 21 nt, RNAi-sense strand
ggcaacuggccuggcaacuuu

SEQ ID NO: 16473 - RNA, 21 nt, RNAi-antisense strand
aguugccaggccaguugccuu

SEQ ID NO: 16474 - DNA, 21 bp, Homo sapiens
caactggcctggcaacttgga

SEQ ID NO: 16475 - RNA, 21 nt, RNAi-sense strand
acuggccuggcaacuuggauu

SEQ ID NO: 16476 - RNA, 21 nt, RNAi-antisense strand
uccaaguugccaggccaguuu

SEQ ID NO: 16477 - DNA, 21 bp, Homo sapiens
caacttggatacttggaacct

SEQ ID NO: 16478 - RNA, 21 nt, RNAi-sense strand
acuuggauacuuggaaccuuu

SEQ ID NO: 16479 - RNA, 21 nt, RNAi-antisense strand
agguuccaaguauccaaguuu

SEQ ID NO: 16480 - DNA, 21 bp, Homo sapiens
cacaactgagacctaagaaat

SEQ ID NO: 16481 - RNA, 21 nt, RNAi-sense strand
caacugagaccuaagaaauuu

SEQ ID NO: 16482 - RNA, 21 nt, RNAi-antisense strand
auuucuuaggucucaguuguu

SEQ ID NO: 16483 - DNA, 21 bp, Homo sapiens
caactgagacctaagaaattg

SEQ ID NO: 16484 - RNA, 21 nt, RNAi-sense strand
acugagaccuaagaaauuguu

SEQ ID NO: 16485 - RNA, 21 nt, RNAi-antisense strand
caauuucuuaggucucaguuu

SEQ ID NO: 16486 - DNA, 21 bp, Homo sapiens
cagagtacaggtctggtacaa

SEQ ID NO: 16487 - RNA, 21 nt, RNAi-sense strand
gaguacaggucugguacaauu

SEQ ID NO: 16488 - RNA, 21 nt, RNAi-antisense strand
uuguaccagaccuguacucuu

SEQ ID NO: 16489 - DNA, 21 bp, Homo sapiens
caggtctggtacaatcacagt

SEQ ID NO: 16490 - RNA, 21 nt, RNAi-sense strand
ggucugguacaaucacaguuu

SEQ ID NO: 16491 - RNA, 21 nt, RNAi-antisense strand
acugugauuguaccagaccuu

SEQ ID NO: 16492 - DNA, 21 bp, Homo sapiens
caatcacagttcattgcagcc

SEQ ID NO: 16493 - RNA, 21 nt, RNAi-sense strand
aucacaguucauugcagccuu

SEQ ID NO: 16494 - RNA, 21 nt, RNAi-antisense strand
ggcugcaaugaacugugauuu

SEQ ID NO: 16495 - DNA, 21 bp, Homo sapiens
cacagttcattgcagcctcaa

SEQ ID NO: 16496 - RNA, 21 nt, RNAi-sense strand
caguucauugcagccucaauu

SEQ ID NO: 16497 - RNA, 21 nt, RNAi-antisense strand
uugaggcugcaaugaacuguu

SEQ ID NO: 16498 - DNA, 21 bp, Homo sapiens
cagttcattgcagcctcaacc

SEQ ID NO: 16499 - RNA, 21 nt, RNAi-sense strand
guucauugcagccucaaccuu

SEQ ID NO: 16500 - RNA, 21 nt, RNAi-antisense strand
gguugaggcugcaaugaacuu

SEQ ID NO: 16501 - DNA, 21 bp, Homo sapiens
cattgcagcctcaacctcctg

SEQ ID NO: 16502 - RNA, 21 nt, RNAi-sense strand
uugcagccucaaccuccuguu

SEQ ID NO: 16503 - RNA, 21 nt, RNAi-antisense strand
caggagguugaggcugcaauu

SEQ ID NO: 16504 - DNA, 21 bp, Homo sapiens
caggcatgagtatttacattg

SEQ ID NO: 16505 - RNA, 21 nt, RNAi-sense strand
ggcaugaguauuuacauuguu

SEQ ID NO: 16506 - RNA, 21 nt, RNAi-antisense strand
caauguaaauacucaugccuu

SEQ ID NO: 16507 - DNA, 21 bp, Homo sapiens
cagttggctatttcttgacat

SEQ ID NO: 16508 - RNA, 21 nt, RNAi-sense strand
guuggcuauuucuugacauuu

SEQ ID NO: 16509 - RNA, 21 nt, RNAi-antisense strand
augucaagaaauagccaacuu

SEQ ID NO: 16510 - DNA, 21 bp, Homo sapiens
caaacttctgcaattgttatg

SEQ ID NO: 16511 - RNA, 21 nt, RNAi-sense strand
aacuucugcaauuguuauguu

SEQ ID NO: 16512 - RNA, 21 nt, RNAi-antisense strand
cauaacaauugcagaaguuuu

SEQ ID NO: 16513 - DNA, 21 bp, Homo sapiens
gagccatggccagtacagtgg

SEQ ID NO: 16514 - RNA, 21 nt, RNAi-sense strand
gccauggccaguacagugguu

SEQ ID NO: 16515 - RNA, 21 nt, RNAi-antisense strand
ccacuguacuggccauggcuu

SEQ ID NO: 16516 - DNA, 21 bp, Homo sapiens
gactgaccattgctgctgcag

SEQ ID NO: 16517 - RNA, 21 nt, RNAi-sense strand
cugaccauugcugcugcaguu

SEQ ID NO: 16518 - RNA, 21 nt, RNAi-antisense strand
cugcagcagcaauggucaguu

SEQ ID NO: 16519 - DNA, 21 bp, Homo sapiens
gaccattgctgctgcaggatt

SEQ ID NO: 16520 - RNA, 21 nt, RNAi-sense strand
ccauugcugcugcaggauuuu

SEQ ID NO: 16521 - RNA, 21 nt, RNAi-antisense strand
aauccugcagcagcaaugguu

SEQ ID NO: 16522 - DNA, 21 bp, Homo sapiens
gatttgcaggccgttacgttt

SEQ ID NO: 16523 - RNA, 21 nt, RNAi-sense strand
uuugcaggccguuacguuuuu

SEQ ID NO: 16524 - RNA, 21 nt, RNAi-antisense strand
aaacguaacggccugcaaauu

SEQ ID NO: 16525 - DNA, 21 bp, Homo sapiens
gaagcatatggagcctcaagt

SEQ ID NO: 16526 - RNA, 21 nt, RNAi-sense strand
agcauauggagccucaaguuu

SEQ ID NO: 16527 - RNA, 21 nt, RNAi-antisense strand
acuugaggcuccauaugcuuu

SEQ ID NO: 16528 - DNA, 21 bp, Homo sapiens
gagatgctcatcgacgaatta

SEQ ID NO: 16529 - RNA, 21 nt, RNAi-sense strand
gaugcucaucgacgaauuauu

SEQ ID NO: 16530 - RNA, 21 nt, RNAi-antisense strand
uaauucgucgaugagcaucuu

SEQ ID NO: 16531 - DNA, 21 bp, Homo sapiens
gatgctcatcgacgaattatg

SEQ ID NO: 16532 - RNA, 21 nt, RNAi-sense strand
ugcucaucgacgaauuauguu

SEQ ID NO: 16533 - RNA, 21 nt, RNAi-antisense strand
cauaauucgucgaugagcauu

SEQ ID NO: 16534 - DNA, 21 bp, Homo sapiens
gacaaaggaggatctccttat

SEQ ID NO: 16535 - RNA, 21 nt, RNAi-sense strand
caaaggaggaucuccuuauuu

SEQ ID NO: 16536 - RNA, 21 nt, RNAi-antisense strand
auaaggagauccuccuuuguu

SEQ ID NO: 16537 - DNA, 21 bp, Homo sapiens
gaggatctccttatatagcag

SEQ ID NO: 16538 - RNA, 21 nt, RNAi-sense strand
ggaucuccuuauauagcaguu

SEQ ID NO: 16539 - RNA, 21 nt, RNAi-antisense strand
cugcuauauaaggagauccuu

SEQ ID NO: 16540 - DNA, 21 bp, Homo sapiens
gatctccttatatagcagcca

SEQ ID NO: 16541 - RNA, 21 nt, RNAi-sense strand
ucuccuuauauagcagccauu

SEQ ID NO: 16542 - RNA, 21 nt, RNAi-antisense strand
uggcugcuauauaaggagauu

SEQ ID NO: 16543 - DNA, 21 bp, Homo sapiens
gatttactagaaggtcaagct

SEQ ID NO: 16544 - RNA, 21 nt, RNAi-sense strand
uuuacuagaaggucaagcuuu

SEQ ID NO: 16545 - RNA, 21 nt, RNAi-antisense strand
agcuugaccuucuaguaaauu

SEQ ID NO: 16546 - DNA, 21 bp, Homo sapiens
gatttagcacaagctaaatct

SEQ ID NO: 16547 - RNA, 21 nt, RNAi-sense strand
uuuagcacaagcuaaaucuuu

SEQ ID NO: 16548 - RNA, 21 nt, RNAi-antisense strand
agauuuagcuugugcuaaauu

SEQ ID NO: 16549 - DNA, 21 bp, Homo sapiens
gaagatgacagtccttgctct

SEQ ID NO: 16550 - RNA, 21 nt, RNAi-sense strand
agaugacaguccuugcucuuu

SEQ ID NO: 16551 - RNA, 21 nt, RNAi-antisense strand
agagcaaggacugucaucuuu

SEQ ID NO: 16552 - DNA, 21 bp, Homo sapiens
gatgacagtccttgctctcag

SEQ ID NO: 16553 - RNA, 21 nt, RNAi-sense strand
ugacaguccuugcucucaguu

SEQ ID NO: 16554 - RNA, 21 nt, RNAi-antisense strand
cugagagcaaggacugucauu

SEQ ID NO: 16555 - DNA, 21 bp, Homo sapiens
gagactgataaactggtaatt

SEQ ID NO: 16556 - RNA, 21 nt, RNAi-sense strand
gacugauaaacugguaauuuu

SEQ ID NO: 16557 - RNA, 21 nt, RNAi-antisense strand
aauuaccaguuuaucagucuu

SEQ ID NO: 16558 - DNA, 21 bp, Homo sapiens
gactgataaactggtaattag

SEQ ID NO: 16559 - RNA, 21 nt, RNAi-sense strand
cugauaaacugguaauuaguu

SEQ ID NO: 16560 - RNA, 21 nt, RNAi-antisense strand
cuaauuaccaguuuaucaguu

SEQ ID NO: 16561 - DNA, 21 bp, Homo sapiens
gataaactggtaattagactg

SEQ ID NO: 16562 - RNA, 21 nt, RNAi-sense strand
uaaacugguaauuagacuguu

SEQ ID NO: 16563 - RNA, 21 nt, RNAi-antisense strand
cagucuaauuaccaguuuauu

SEQ ID NO: 16564 - DNA, 21 bp, Homo sapiens
gatggaaattagcttaagctg

SEQ ID NO: 16565 - RNA, 21 nt, RNAi-sense strand
uggaaauuagcuuaagcuguu

SEQ ID NO: 16566 - RNA, 21 nt, RNAi-antisense strand
cagcuuaagcuaauuuccauu

SEQ ID NO: 16567 - DNA, 21 bp, Homo sapiens
gactcttcttattcggtggaa

SEQ ID NO: 16568 - RNA, 21 nt, RNAi-sense strand
cucuucuuauucgguggaauu

SEQ ID NO: 16569 - RNA, 21 nt, RNAi-antisense strand
uuccaccgaauaagaagaguu

SEQ ID NO: 16570 - DNA, 21 bp, Homo sapiens
gaaaggctgttccaggtacag

SEQ ID NO: 16571 - RNA, 21 nt, RNAi-sense strand
aaggcuguuccagguacaguu

SEQ ID NO: 16572 - RNA, 21 nt, RNAi-antisense strand
cuguaccuggaacagccuuuu

SEQ ID NO: 16573 - DNA, 21 bp, Homo sapiens
gatacttggaaccttgtattt

SEQ ID NO: 16574 - RNA, 21 nt, RNAi-sense strand
uacuuggaaccuuguauuuuu

SEQ ID NO: 16575 - RNA, 21 nt, RNAi-antisense strand
aaauacaagguuccaaguauu

SEQ ID NO: 16576 - DNA, 21 bp, Homo sapiens
gaatttaaccacaactgagac

SEQ ID NO: 16577 - RNA, 21 nt, RNAi-sense strand
auuuaaccacaacugagacuu

SEQ ID NO: 16578 - RNA, 21 nt, RNAi-antisense strand
gucucaguugugguuaaauuu

SEQ ID NO: 16579 - DNA, 21 bp, Homo sapiens
gagacctaagaaattgaccta

SEQ ID NO: 16580 - RNA, 21 nt, RNAi-sense strand
gaccuaagaaauugaccuauu

SEQ ID NO: 16581 - RNA, 21 nt, RNAi-antisense strand
uaggucaauuucuuaggucuu

SEQ ID NO: 16582 - DNA, 21 bp, Homo sapiens
gacctaagaaattgacctagg

SEQ ID NO: 16583 - RNA, 21 nt, RNAi-sense strand
ccuaagaaauugaccuagguu

SEQ ID NO: 16584 - RNA, 21 nt, RNAi-antisense strand
ccuaggucaauuucuuagguu

SEQ ID NO: 16585 - DNA, 21 bp, Homo sapiens
gataaagatttcagagtacag

SEQ ID NO: 16586 - RNA, 21 nt, RNAi-sense strand
uaaagauuucagaguacaguu

SEQ ID NO: 16587 - RNA, 21 nt, RNAi-antisense strand
cuguacucugaaaucuuuauu

SEQ ID NO: 16588 - DNA, 21 bp, Homo sapiens
gatttcagagtacaggtctgg

SEQ ID NO: 16589 - RNA, 21 nt, RNAi-sense strand
uuucagaguacaggucugguu

SEQ ID NO: 16590 - RNA, 21 nt, RNAi-antisense strand
ccagaccuguacucugaaauu

SEQ ID NO: 16591 - DNA, 21 bp, Homo sapiens
gagtacaggtctggtacaatc

SEQ ID NO: 16592 - RNA, 21 nt, RNAi-sense strand
guacaggucugguacaaucuu

SEQ ID NO: 16593 - RNA, 21 nt, RNAi-antisense strand
gauuguaccagaccuguacuu

SEQ ID NO: 16594 - DNA, 21 bp, Homo sapiens
gattacaggcatgagtattta

SEQ ID NO: 16595 - RNA, 21 nt, RNAi-sense strand
uuacaggcaugaguauuuauu

SEQ ID NO: 16596 - RNA, 21 nt, RNAi-antisense strand
uaaauacucaugccuguaauu

SEQ ID NO: 16597 - DNA, 21 bp, Homo sapiens
gacataatcaaacttctgcaa

SEQ ID NO: 16598 - RNA, 21 nt, RNAi-sense strand
cauaaucaaacuucugcaauu

SEQ ID NO: 16599 - RNA, 21 nt, RNAi-antisense strand
uugcagaaguuugauuauguu

SEQ ID NO: 16600 - DNA, 21 bp, Homo sapiens
taaaggcgtgcaggtgttggc

SEQ ID NO: 16601 - RNA, 21 nt, RNAi-sense strand
aaggcgugcagguguuggcuu

SEQ ID NO: 16602 - RNA, 21 nt, RNAi-antisense strand
gccaacaccugcacgccuuuu

SEQ ID NO: 16603 - DNA, 21 bp, Homo sapiens
tacagtggtagcagttggact

SEQ ID NO: 16604 - RNA, 21 nt, RNAi-sense strand
cagugguagcaguuggacuuu

SEQ ID NO: 16605 - RNA, 21 nt, RNAi-antisense strand
aguccaacugcuaccacuguu

SEQ ID NO: 16606 - DNA, 21 bp, Homo sapiens
tagcagttggactgaccattg

SEQ ID NO: 16607 - RNA, 21 nt, RNAi-sense strand
gcaguuggacugaccauuguu

SEQ ID NO: 16608 - RNA, 21 nt, RNAi-antisense strand
caauggucaguccaacugcuu

SEQ ID NO: 16609 - DNA, 21 bp, Homo sapiens
taagagatgctcatcgacgaa

SEQ ID NO: 16610 - RNA, 21 nt, RNAi-sense strand
agagaugcucaucgacgaauu

SEQ ID NO: 16611 - RNA, 21 nt, RNAi-antisense strand
uucgucgaugagcaucucuuu

SEQ ID NO: 16612 - DNA, 21 bp, Homo sapiens
taaatcatcctgacaaaggag

SEQ ID NO: 16613 - RNA, 21 nt, RNAi-sense strand
aaucauccugacaaaggaguu

SEQ ID NO: 16614 - RNA, 21 nt, RNAi-antisense strand
cuccuuugucaggaugauuuu

SEQ ID NO: 16615 - DNA, 21 bp, Homo sapiens
tagcacaagctaaatctcaaa

SEQ ID NO: 16616 - RNA, 21 nt, RNAi-sense strand
gcacaagcuaaaucucaaauu

SEQ ID NO: 16617 - RNA, 21 nt, RNAi-antisense strand
uuugagauuuagcuugugcuu

SEQ ID NO: 16618 - DNA, 21 bp, Homo sapiens
taaatctcaaagccttggtat

SEQ ID NO: 16619 - RNA, 21 nt, RNAi-sense strand
aaucucaaagccuugguauuu

SEQ ID NO: 16620 - RNA, 21 nt, RNAi-antisense strand
auaccaaggcuuugagauuuu

SEQ ID NO: 16621 - DNA, 21 bp, Homo sapiens
taaactggtaattagactgtg

SEQ ID NO: 16622 - RNA, 21 nt, RNAi-sense strand
aacugguaauuagacuguguu

SEQ ID NO: 16623 - RNA, 21 nt, RNAi-antisense strand
cacagucuaauuaccaguuuu

SEQ ID NO: 16624 - DNA, 21 bp, Homo sapiens
tagcttaagctgtttaagtag

SEQ ID NO: 16625 - RNA, 21 nt, RNAi-sense strand
gcuuaagcuguuuaaguaguu

SEQ ID NO: 16626 - RNA, 21 nt, RNAi-antisense strand
cuacuuaaacagcuuaagcuu

SEQ ID NO: 16627 - DNA, 21 bp, Homo sapiens
tattcggtggaaaggctgttc

SEQ ID NO: 16628 - RNA, 21 nt, RNAi-sense strand
uucgguggaaaggcuguucuu

SEQ ID NO: 16629 - RNA, 21 nt, RNAi-antisense strand
gaacagccuuuccaccgaauu

SEQ ID NO: 16630 - DNA, 21 bp, Homo sapiens
tacaggcaactggcctggcaa

SEQ ID NO: 16631 - RNA, 21 nt, RNAi-sense strand
caggcaacuggccuggcaauu

SEQ ID NO: 16632 - RNA, 21 nt, RNAi-antisense strand
uugccaggccaguugccuguu

SEQ ID NO: 16633 - DNA, 21 bp, Homo sapiens
taaccacaactgagacctaag

SEQ ID NO: 16634 - RNA, 21 nt, RNAi-sense strand
accacaacugagaccuaaguu

SEQ ID NO: 16635 - RNA, 21 nt, RNAi-antisense strand
cuuaggucucaguugugguuu

SEQ ID NO: 16636 - DNA, 21 bp, Homo sapiens
taaagatttcagagtacaggt

SEQ ID NO: 16637 - RNA, 21 nt, RNAi-sense strand
aagauuucagaguacagguuu

SEQ ID NO: 16638 - RNA, 21 nt, RNAi-antisense strand
accuguacucugaaaucuuuu

SEQ ID NO: 16639 - DNA, 21 bp, Homo sapiens
tacaggtctggtacaatcaca

SEQ ID NO: 16640 - RNA, 21 nt, RNAi-sense strand
caggucugguacaaucacauu

SEQ ID NO: 16641 - RNA, 21 nt, RNAi-antisense strand
ugugauuguaccagaccuguu

SEQ ID NO: 16642 - DNA, 21 bp, Homo sapiens
tacaatcacagttcattgcag

SEQ ID NO: 16643 - RNA, 21 nt, RNAi-sense strand
caaucacaguucauugcaguu

SEQ ID NO: 16644 - RNA, 21 nt, RNAi-antisense strand
cugcaaugaacugugauuguu

SEQ ID NO: 16645 - DNA, 21 bp, Homo sapiens
tacaggcatgagtatttacat

SEQ ID NO: 16646 - RNA, 21 nt, RNAi-sense strand
caggcaugaguauuuacauuu

SEQ ID NO: 16647 - RNA, 21 nt, RNAi-antisense strand
auguaaauacucaugccuguu

SEQ ID NO: 16648 - DNA, 21 bp, Homo sapiens
taaattattccttcagttggc

SEQ ID NO: 16649 - RNA, 21 nt, RNAi-sense strand
aauuauuccuucaguuggcuu

SEQ ID NO: 16650 - RNA, 21 nt, RNAi-antisense strand
gccaacugaaggaauaauuuu

SEQ ID NO: 16651 - DNA, 21 bp, Homo sapiens
tattccttcagttggctattt

SEQ ID NO: 16652 - RNA, 21 nt, RNAi-sense strand
uuccuucaguuggcuauuuuu

SEQ ID NO: 16653 - RNA, 21 nt, RNAi-antisense strand
aaauagccaacugaaggaauu

SEQ ID NO: 16654 - DNA, 21 bp, Homo sapiens
aacatgtcctttgtgaaggag

SEQ ID NO: 16655 - RNA, 21 nt, RNAi-sense strand
cauguccuuugugaaggaguu

SEQ ID NO: 16656 - RNA, 21 nt, RNAi-antisense strand
cuccuucacaaaggacauguu

SEQ ID NO: 16657 - DNA, 21 bp, Homo sapiens
aaggagacggtggacaagctg

SEQ ID NO: 16658 - RNA, 21 nt, RNAi-sense strand
ggagacgguggacaagcuguu

SEQ ID NO: 16659 - RNA, 21 nt, RNAi-antisense strand
cagcuuguccaccgucuccuu

SEQ ID NO: 16660 - DNA, 21 bp, Homo sapiens
aagctgttgaaaggctacgac

SEQ ID NO: 16661 - RNA, 21 nt, RNAi-sense strand
gcuguugaaaggcuacgacuu

SEQ ID NO: 16662 - RNA, 21 nt, RNAi-antisense strand
gucguagccuuucaacagcuu

SEQ ID NO: 16663 - DNA, 21 bp, Homo sapiens
aaaggctacgacattcgccta

SEQ ID NO: 16664 - RNA, 21 nt, RNAi-sense strand
aggcuacgacauucgccuauu

SEQ ID NO: 16665 - RNA, 21 nt, RNAi-antisense strand
uaggcgaaugucguagccuuu

SEQ ID NO: 16666 - DNA, 21 bp, Homo sapiens
aaggctacgacattcgcctaa

SEQ ID NO: 16667 - RNA, 21 nt, RNAi-sense strand
ggcuacgacauucgccuaauu

SEQ ID NO: 16668 - RNA, 21 nt, RNAi-antisense strand
uuaggcgaaugucguagccuu

SEQ ID NO: 16669 - DNA, 21 bp, Homo sapiens
aacatcgacatcgccagcatc

SEQ ID NO: 16670 - RNA, 21 nt, RNAi-sense strand
caucgacaucgccagcaucuu

SEQ ID NO: 16671 - RNA, 21 nt, RNAi-antisense strand
gaugcuggcgaugucgauguu

SEQ ID NO: 16672 - DNA, 21 bp, Homo sapiens
aagtcaacatggattatacct

SEQ ID NO: 16673 - RNA, 21 nt, RNAi-sense strand
gucaacauggauuauaccuuu

SEQ ID NO: 16674 - RNA, 21 nt, RNAi-antisense strand
agguauaauccauguugacuu

SEQ ID NO: 16675 - DNA, 21 bp, Homo sapiens
aacatggattataccttaacc

SEQ ID NO: 16676 - RNA, 21 nt, RNAi-sense strand
cauggauuauaccuuaaccuu

SEQ ID NO: 16677 - RNA, 21 nt, RNAi-antisense strand
gguuaagguauaauccauguu

SEQ ID NO: 16678 - DNA, 21 bp, Homo sapiens
aacctcacgcttgacaatcga

SEQ ID NO: 16679 - RNA, 21 nt, RNAi-sense strand
ccucacgcuugacaaucgauu

SEQ ID NO: 16680 - RNA, 21 nt, RNAi-antisense strand
ucgauugucaagcgugagguu

SEQ ID NO: 16681 - DNA, 21 bp, Homo sapiens
aatcgagtggctgaccagcta

SEQ ID NO: 16682 - RNA, 21 nt, RNAi-sense strand
ucgaguggcugaccagcuauu

SEQ ID NO: 16683 - RNA, 21 nt, RNAi-antisense strand
uagcuggucagccacucgauu

SEQ ID NO: 16684 - DNA, 21 bp, Homo sapiens
aaagtcatttgtgcatggagt

SEQ ID NO: 16685 - RNA, 21 nt, RNAi-sense strand
agucauuugugcauggaguuu

SEQ ID NO: 16686 - RNA, 21 nt, RNAi-antisense strand
acuccaugcacaaaugacuuu

SEQ ID NO: 16687 - DNA, 21 bp, Homo sapiens
aagtcatttgtgcatggagtg

SEQ ID NO: 16688 - RNA, 21 nt, RNAi-sense strand
gucauuugugcauggaguguu

SEQ ID NO: 16689 - RNA, 21 nt, RNAi-antisense strand
cacuccaugcacaaaugacuu

SEQ ID NO: 16690 - DNA, 21 bp, Homo sapiens
aaaccgcatgatccgtcttca

SEQ ID NO: 16691 - RNA, 21 nt, RNAi-sense strand
accgcaugauccgucuucauu

SEQ ID NO: 16692 - RNA, 21 nt, RNAi-antisense strand
ugaagacggaucaugcgguuu

SEQ ID NO: 16693 - DNA, 21 bp, Homo sapiens
aaccgcatgatccgtcttcac

SEQ ID NO: 16694 - RNA, 21 nt, RNAi-sense strand
ccgcaugauccgucuucacuu

SEQ ID NO: 16695 - RNA, 21 nt, RNAi-antisense strand
gugaagacggaucaugcgguu

SEQ ID NO: 16696 - DNA, 21 bp, Homo sapiens
aatcaccacgacagcagcatg

SEQ ID NO: 16697 - RNA, 21 nt, RNAi-sense strand
ucaccacgacagcagcauguu

SEQ ID NO: 16698 - RNA, 21 nt, RNAi-antisense strand
caugcugcugucguggugauu

SEQ ID NO: 16699 - DNA, 21 bp, Homo sapiens
aactgcactctggaaattgaa

SEQ ID NO: 16700 - RNA, 21 nt, RNAi-sense strand
cugcacucuggaaauugaauu

SEQ ID NO: 16701 - RNA, 21 nt, RNAi-antisense strand
uucaauuuccagagugcaguu

SEQ ID NO: 16702 - DNA, 21 bp, Homo sapiens
aaattgaaagctatggctaca

SEQ ID NO: 16703 - RNA, 21 nt, RNAi-sense strand
auugaaagcuauggcuacauu

SEQ ID NO: 16704 - RNA, 21 nt, RNAi-antisense strand
uguagccauagcuuucaauuu

SEQ ID NO: 16705 - DNA, 21 bp, Homo sapiens
aattgaaagctatggctacac

SEQ ID NO: 16706 - RNA, 21 nt, RNAi-sense strand
uugaaagcuauggcuacacuu

SEQ ID NO: 16707 - RNA, 21 nt, RNAi-antisense strand
guguagccauagcuuucaauu

SEQ ID NO: 16708 - DNA, 21 bp, Homo sapiens
aaagctatggctacaccacgg

SEQ ID NO: 16709 - RNA, 21 nt, RNAi-sense strand
agcuauggcuacaccacgguu

SEQ ID NO: 16710 - RNA, 21 nt, RNAi-antisense strand
ccgugguguagccauagcuuu

SEQ ID NO: 16711 - DNA, 21 bp, Homo sapiens
aagctatggctacaccacgga

SEQ ID NO: 16712 - RNA, 21 nt, RNAi-sense strand
gcuauggcuacaccacggauu

SEQ ID NO: 16713 - RNA, 21 nt, RNAi-antisense strand
uccgugguguagccauagcuu

SEQ ID NO: 16714 - DNA, 21 bp, Homo sapiens
aaggctgttaccggagtggaa

SEQ ID NO: 16715 - RNA, 21 nt, RNAi-sense strand
ggcuguuaccggaguggaauu

SEQ ID NO: 16716 - RNA, 21 nt, RNAi-antisense strand
uuccacuccgguaacagccuu

SEQ ID NO: 16717 - DNA, 21 bp, Homo sapiens
aatgttgtcttcgccacaggt

SEQ ID NO: 16718 - RNA, 21 nt, RNAi-sense strand
uguugucuucgccacagguuu

SEQ ID NO: 16719 - RNA, 21 nt, RNAi-antisense strand
accuguggcgaagacaacauu

SEQ ID NO: 16720 - DNA, 21 bp, Homo sapiens
aagaggaacattggatacttc

SEQ ID NO: 16721 - RNA, 21 nt, RNAi-sense strand
gaggaacauuggauacuucuu

SEQ ID NO: 16722 - RNA, 21 nt, RNAi-antisense strand
gaaguauccaauguuccucuu

SEQ ID NO: 16723 - DNA, 21 bp, Homo sapiens
aattatgatgcatctgctgct

SEQ ID NO: 16724 - RNA, 21 nt, RNAi-sense strand
uuaugaugcaucugcugcuuu

SEQ ID NO: 16725 - RNA, 21 nt, RNAi-antisense strand
agcagcagaugcaucauaauu

SEQ ID NO: 16726 - DNA, 21 bp, Homo sapiens
aactgtgctgacaatgacaac

SEQ ID NO: 16727 - RNA, 21 nt, RNAi-sense strand
cugugcugacaaugacaacuu

SEQ ID NO: 16728 - RNA, 21 nt, RNAi-antisense strand
guugucauugucagcacaguu

SEQ ID NO: 16729 - DNA, 21 bp, Homo sapiens
aaagccattgacatgtacctt

SEQ ID NO: 16730 - RNA, 21 nt, RNAi-sense strand
agccauugacauguaccuuuu

SEQ ID NO: 16731 - RNA, 21 nt, RNAi-antisense strand
aagguacaugucaauggcuuu

SEQ ID NO: 16732 - DNA, 21 bp, Homo sapiens
aagccattgacatgtacctta

SEQ ID NO: 16733 - RNA, 21 nt, RNAi-sense strand
gccauugacauguaccuuauu

SEQ ID NO: 16734 - RNA, 21 nt, RNAi-antisense strand
uaagguacaugucaauggcuu

SEQ ID NO: 16735 - DNA, 21 bp, Homo sapiens
aaaggcagaagaagcttgcag

SEQ ID NO: 16736 - RNA, 21 nt, RNAi-sense strand
aggcagaagaagcuugcaguu

SEQ ID NO: 16737 - RNA, 21 nt, RNAi-antisense strand
cugcaagcuucuucugccuuu

SEQ ID NO: 16738 - DNA, 21 bp, Homo sapiens
aaggcagaagaagcttgcaga

SEQ ID NO: 16739 - RNA, 21 nt, RNAi-sense strand
ggcagaagaagcuugcagauu

SEQ ID NO: 16740 - RNA, 21 nt, RNAi-antisense strand
ucugcaagcuucuucugccuu

SEQ ID NO: 16741 - DNA, 21 bp, Homo sapiens
aaagacagccaaggcaaagaa

SEQ ID NO: 16742 - RNA, 21 nt, RNAi-sense strand
agacagccaaggcaaagaauu

SEQ ID NO: 16743 - RNA, 21 nt, RNAi-antisense strand
uucuuugccuuggcugucuuu

SEQ ID NO: 16744 - DNA, 21 bp, Homo sapiens
aagacagccaaggcaaagaat

SEQ ID NO: 16745 - RNA, 21 nt, RNAi-sense strand
gacagccaaggcaaagaauuu

SEQ ID NO: 16746 - RNA, 21 nt, RNAi-antisense strand
auucuuugccuuggcugucuu

SEQ ID NO: 16747 - DNA, 21 bp, Homo sapiens
aaggcaaagaatgaccgttca

SEQ ID NO: 16748 - RNA, 21 nt, RNAi-sense strand
ggcaaagaaugaccguucauu

SEQ ID NO: 16749 - RNA, 21 nt, RNAi-antisense strand
ugaacggucauucuuugccuu

SEQ ID NO: 16750 - DNA, 21 bp, Homo sapiens
aaagaatgaccgttcaaagag

SEQ ID NO: 16751 - RNA, 21 nt, RNAi-sense strand
agaaugaccguucaaagaguu

SEQ ID NO: 16752 - RNA, 21 nt, RNAi-antisense strand
cucuuugaacggucauucuuu

SEQ ID NO: 16753 - DNA, 21 bp, Homo sapiens
aagaatgaccgttcaaagagc

SEQ ID NO: 16754 - RNA, 21 nt, RNAi-sense strand
gaaugaccguucaaagagcuu

SEQ ID NO: 16755 - RNA, 21 nt, RNAi-antisense strand
gcucuuugaacggucauucuu

SEQ ID NO: 16756 - DNA, 21 bp, Homo sapiens
aatgaccgttcaaagagcgaa

SEQ ID NO: 16757 - RNA, 21 nt, RNAi-sense strand
ugaccguucaaagagcgaauu

SEQ ID NO: 16758 - RNA, 21 nt, RNAi-antisense strand
uucgcucuuugaacggucauu

SEQ ID NO: 16759 - DNA, 21 bp, Homo sapiens
aaatattctgttgacatcgct

SEQ ID NO: 16760 - RNA, 21 nt, RNAi-sense strand
auauucuguugacaucgcuuu

SEQ ID NO: 16761 - RNA, 21 nt, RNAi-antisense strand
agcgaugucaacagaauauuu

SEQ ID NO: 16762 - DNA, 21 bp, Homo sapiens
aatattctgttgacatcgctg

SEQ ID NO: 16763 - RNA, 21 nt, RNAi-sense strand
uauucuguugacaucgcuguu

SEQ ID NO: 16764 - RNA, 21 nt, RNAi-antisense strand
cagcgaugucaacagaauauu

SEQ ID NO: 16765 - DNA, 21 bp, Homo sapiens
aatgaaatgaatgaggtctca

SEQ ID NO: 16766 - RNA, 21 nt, RNAi-sense strand
ugaaaugaaugaggucucauu

SEQ ID NO: 16767 - RNA, 21 nt, RNAi-antisense strand
ugagaccucauucauuucauu

SEQ ID NO: 16768 - DNA, 21 bp, Homo sapiens
aaatgaatgaggtctcaggcg

SEQ ID NO: 16769 - RNA, 21 nt, RNAi-sense strand
augaaugaggucucaggcguu

SEQ ID NO: 16770 - RNA, 21 nt, RNAi-antisense strand
cgccugagaccucauucauuu

SEQ ID NO: 16771 - DNA, 21 bp, Homo sapiens
aatgaatgaggtctcaggcgg

SEQ ID NO: 16772 - RNA, 21 nt, RNAi-sense strand
ugaaugaggucucaggcgguu

SEQ ID NO: 16773 - RNA, 21 nt, RNAi-antisense strand
ccgccugagaccucauucauu

SEQ ID NO: 16774 - DNA, 21 bp, Homo sapiens
aatgaggtctcaggcggcatt

SEQ ID NO: 16775 - RNA, 21 nt, RNAi-sense strand
ugaggucucaggcggcauuuu

SEQ ID NO: 16776 - RNA, 21 nt, RNAi-antisense strand
aaugccgccugagaccucauu

SEQ ID NO: 16777 - DNA, 21 bp, Homo sapiens
aattcagcaatatcctttgac

SEQ ID NO: 16778 - RNA, 21 nt, RNAi-sense strand
uucagcaauauccuuugacuu

SEQ ID NO: 16779 - RNA, 21 nt, RNAi-antisense strand
gucaaaggauauugcugaauu

SEQ ID NO: 16780 - DNA, 21 bp, Homo sapiens
aatatcctttgacaactcagg

SEQ ID NO: 16781 - RNA, 21 nt, RNAi-sense strand
uauccuuugacaacucagguu

SEQ ID NO: 16782 - RNA, 21 nt, RNAi-antisense strand
ccugaguugucaaaggauauu

SEQ ID NO: 16783 - DNA, 21 bp, Homo sapiens
aactcaggaatccagtacagg

SEQ ID NO: 16784 - RNA, 21 nt, RNAi-sense strand
cucaggaauccaguacagguu

SEQ ID NO: 16785 - RNA, 21 nt, RNAi-antisense strand
ccuguacuggauuccugaguu

SEQ ID NO: 16786 - DNA, 21 bp, Homo sapiens
aatccagtacaggaaacagag

SEQ ID NO: 16787 - RNA, 21 nt, RNAi-sense strand
uccaguacaggaaacagaguu

SEQ ID NO: 16788 - RNA, 21 nt, RNAi-antisense strand
cucuguuuccuguacuggauu

SEQ ID NO: 16789 - DNA, 21 bp, Homo sapiens
aaacagagcatgcctcgagaa

SEQ ID NO: 16790 - RNA, 21 nt, RNAi-sense strand
acagagcaugccucgagaauu

SEQ ID NO: 16791 - RNA, 21 nt, RNAi-antisense strand
uucucgaggcaugcucuguuu

SEQ ID NO: 16792 - DNA, 21 bp, Homo sapiens
aacagagcatgcctcgagaag

SEQ ID NO: 16793 - RNA, 21 nt, RNAi-sense strand
cagagcaugccucgagaaguu

SEQ ID NO: 16794 - RNA, 21 nt, RNAi-antisense strand
cuucucgaggcaugcucuguu

SEQ ID NO: 16795 - DNA, 21 bp, Homo sapiens
aaatacctgatctaaccgatg

SEQ ID NO: 16796 - RNA, 21 nt, RNAi-sense strand
auaccugaucuaaccgauguu

SEQ ID NO: 16797 - RNA, 21 nt, RNAi-antisense strand
caucgguuagaucagguauuu

SEQ ID NO: 16798 - DNA, 21 bp, Homo sapiens
aatacctgatctaaccgatgt

SEQ ID NO: 16799 - RNA, 21 nt, RNAi-sense strand
uaccugaucuaaccgauguuu

SEQ ID NO: 16800 - RNA, 21 nt, RNAi-antisense strand
acaucgguuagaucagguauu

SEQ ID NO: 16801 - DNA, 21 bp, Homo sapiens
aaccgatgtgaatgccataga

SEQ ID NO: 16802 - RNA, 21 nt, RNAi-sense strand
ccgaugugaaugccauagauu

SEQ ID NO: 16803 - RNA, 21 nt, RNAi-antisense strand
ucuauggcauucacaucgguu

SEQ ID NO: 16804 - DNA, 21 bp, Homo sapiens
aatgccatagacagatggtcc

SEQ ID NO: 16805 - RNA, 21 nt, RNAi-sense strand
ugccauagacagaugguccuu

SEQ ID NO: 16806 - RNA, 21 nt, RNAi-antisense strand
ggaccaucugucuauggcauu

SEQ ID NO: 16807 - DNA, 21 bp, Homo sapiens
aacttagtttactggctgtac

SEQ ID NO: 16808 - RNA, 21 nt, RNAi-sense strand
cuuaguuuacuggcuguacuu

SEQ ID NO: 16809 - RNA, 21 nt, RNAi-antisense strand
guacagccaguaaacuaaguu

SEQ ID NO: 16810 - DNA, 21 bp, Homo sapiens
aactgagtgactgtacttgat

SEQ ID NO: 16811 - RNA, 21 nt, RNAi-sense strand
cugagugacuguacuugauuu

SEQ ID NO: 16812 - RNA, 21 nt, RNAi-antisense strand
aucaaguacagucacucaguu

SEQ ID NO: 16813 - DNA, 21 bp, Homo sapiens
aagacttcatttaacactgag

SEQ ID NO: 16814 - RNA, 21 nt, RNAi-sense strand
gacuucauuuaacacugaguu

SEQ ID NO: 16815 - RNA, 21 nt, RNAi-antisense strand
cucaguguuaaaugaagucuu

SEQ ID NO: 16816 - DNA, 21 bp, Homo sapiens
aaatattactctgcctgtcaa

SEQ ID NO: 16817 - RNA, 21 nt, RNAi-sense strand
auauuacucugccugucaauu

SEQ ID NO: 16818 - RNA, 21 nt, RNAi-antisense strand
uugacaggcagaguaauauuu

SEQ ID NO: 16819 - DNA, 21 bp, Homo sapiens
aatattactctgcctgtcaag

SEQ ID NO: 16820 - RNA, 21 nt, RNAi-sense strand
uauuacucugccugucaaguu

SEQ ID NO: 16821 - RNA, 21 nt, RNAi-antisense strand
cuugacaggcagaguaauauu

SEQ ID NO: 16822 - DNA, 21 bp, Homo sapiens
aagcagacacacacatatata

SEQ ID NO: 16823 - RNA, 21 nt, RNAi-sense strand
gcagacacacacauauauauu

SEQ ID NO: 16824 - RNA, 21 nt, RNAi-antisense strand
uauauaugugugugucugcuu

SEQ ID NO: 16825 - DNA, 21 bp, Homo sapiens
aaatacacgtgtatatgagga

SEQ ID NO: 16826 - RNA, 21 nt, RNAi-sense strand
auacacguguauaugaggauu

SEQ ID NO: 16827 - RNA, 21 nt, RNAi-antisense strand
uccucauauacacguguauuu

SEQ ID NO: 16828 - DNA, 21 bp, Homo sapiens
aatacacgtgtatatgaggat

SEQ ID NO: 16829 - RNA, 21 nt, RNAi-sense strand
uacacguguauaugaggauuu

SEQ ID NO: 16830 - RNA, 21 nt, RNAi-antisense strand
auccucauauacacguguauu

SEQ ID NO: 16831 - DNA, 21 bp, Homo sapiens
aatttaccacaggatgcatat

SEQ ID NO: 16832 - RNA, 21 nt, RNAi-sense strand
uuuaccacaggaugcauauuu

SEQ ID NO: 16833 - RNA, 21 nt, RNAi-antisense strand
auaugcauccugugguaaauu

SEQ ID NO: 16834 - DNA, 21 bp, Homo sapiens
aaactcatacagtggtattgc

SEQ ID NO: 16835 - RNA, 21 nt, RNAi-sense strand
acucauacagugguauugcuu

SEQ ID NO: 16836 - RNA, 21 nt, RNAi-antisense strand
gcaauaccacuguaugaguuu

SEQ ID NO: 16837 - DNA, 21 bp, Homo sapiens
aactcatacagtggtattgct

SEQ ID NO: 16838 - RNA, 21 nt, RNAi-sense strand
cucauacagugguauugcuuu

SEQ ID NO: 16839 - RNA, 21 nt, RNAi-antisense strand
agcaauaccacuguaugaguu

SEQ ID NO: 16840 - DNA, 21 bp, Homo sapiens
aagcaaaggcttcttggcttc

SEQ ID NO: 16841 - RNA, 21 nt, RNAi-sense strand
gcaaaggcuucuuggcuucuu

SEQ ID NO: 16842 - RNA, 21 nt, RNAi-antisense strand
gaagccaagaagccuuugcuu

SEQ ID NO: 16843 - DNA, 21 bp, Homo sapiens
aaaggcttcttggcttctctg

SEQ ID NO: 16844 - RNA, 21 nt, RNAi-sense strand
aggcuucuuggcuucucuguu

SEQ ID NO: 16845 - RNA, 21 nt, RNAi-antisense strand
cagagaagccaagaagccuuu

SEQ ID NO: 16846 - DNA, 21 bp, Homo sapiens
aaggcttcttggcttctctgg

SEQ ID NO: 16847 - RNA, 21 nt, RNAi-sense strand
ggcuucuuggcuucucugguu

SEQ ID NO: 16848 - RNA, 21 nt, RNAi-antisense strand
ccagagaagccaagaagccuu

SEQ ID NO: 16849 - DNA, 21 bp, Homo sapiens
aatggcatctcgttgtaagta

SEQ ID NO: 16850 - RNA, 21 nt, RNAi-sense strand
uggcaucucguuguaaguauu

SEQ ID NO: 16851 - RNA, 21 nt, RNAi-antisense strand
uacuuacaacgagaugccauu

SEQ ID NO: 16852 - DNA, 21 bp, Homo sapiens
aacacagtgacacgtttggcc

SEQ ID NO: 16853 - RNA, 21 nt, RNAi-sense strand
cacagugacacguuuggccuu

SEQ ID NO: 16854 - RNA, 21 nt, RNAi-antisense strand
ggccaaacgugucacuguguu

SEQ ID NO: 16855 - DNA, 21 bp, Homo sapiens
aaatgtgctctacatctcgta

SEQ ID NO: 16856 - RNA, 21 nt, RNAi-sense strand
augugcucuacaucucguauu

SEQ ID NO: 16857 - RNA, 21 nt, RNAi-antisense strand
uacgagauguagagcacauuu

SEQ ID NO: 16858 - DNA, 21 bp, Homo sapiens
aatgtgctctacatctcgtat

SEQ ID NO: 16859 - RNA, 21 nt, RNAi-sense strand
ugugcucuacaucucguauuu

SEQ ID NO: 16860 - RNA, 21 nt, RNAi-antisense strand
auacgagauguagagcacauu

SEQ ID NO: 16861 - DNA, 21 bp, Homo sapiens
aacagaaagcatagacgtctc

SEQ ID NO: 16862 - RNA, 21 nt, RNAi-sense strand
cagaaagcauagacgucucuu

SEQ ID NO: 16863 - RNA, 21 nt, RNAi-antisense strand
gagacgucuaugcuuucuguu

SEQ ID NO: 16864 - DNA, 21 bp, Homo sapiens
aaagcatagacgtctcaggtt

SEQ ID NO: 16865 - RNA, 21 nt, RNAi-sense strand
agcauagacgucucagguuuu

SEQ ID NO: 16866 - RNA, 21 nt, RNAi-antisense strand
aaccugagacgucuaugcuuu

SEQ ID NO: 16867 - DNA, 21 bp, Homo sapiens
aagcatagacgtctcaggtta

SEQ ID NO: 16868 - RNA, 21 nt, RNAi-sense strand
gcauagacgucucagguuauu

SEQ ID NO: 16869 - RNA, 21 nt, RNAi-antisense strand
uaaccugagacgucuaugcuu

SEQ ID NO: 16870 - DNA, 21 bp, Homo sapiens
aaactaagaatcatcctcatg

SEQ ID NO: 16871 - RNA, 21 nt, RNAi-sense strand
acuaagaaucauccucauguu

SEQ ID NO: 16872 - RNA, 21 nt, RNAi-antisense strand
caugaggaugauucuuaguuu

SEQ ID NO: 16873 - DNA, 21 bp, Homo sapiens
aactaagaatcatcctcatgc

SEQ ID NO: 16874 - RNA, 21 nt, RNAi-sense strand
cuaagaaucauccucaugcuu

SEQ ID NO: 16875 - RNA, 21 nt, RNAi-antisense strand
gcaugaggaugauucuuaguu

SEQ ID NO: 16876 - DNA, 21 bp, Homo sapiens
aagaatcatcctcatgccttt

SEQ ID NO: 16877 - RNA, 21 nt, RNAi-sense strand
gaaucauccucaugccuuuuu

SEQ ID NO: 16878 - RNA, 21 nt, RNAi-antisense strand
aaaggcaugaggaugauucuu

SEQ ID NO: 16879 - DNA, 21 bp, Homo sapiens
aatcatcctcatgcctttatt

SEQ ID NO: 16880 - RNA, 21 nt, RNAi-sense strand
ucauccucaugccuuuauuuu

SEQ ID NO: 16881 - RNA, 21 nt, RNAi-antisense strand
aauaaaggcaugaggaugauu

SEQ ID NO: 16882 - DNA, 21 bp, Homo sapiens
aagcacatccaactactccta

SEQ ID NO: 16883 - RNA, 21 nt, RNAi-sense strand
gcacauccaacuacuccuauu

SEQ ID NO: 16884 - RNA, 21 nt, RNAi-antisense strand
uaggaguaguuggaugugcuu

SEQ ID NO: 16885 - DNA, 21 bp, Homo sapiens
aactactcctagactgactag

SEQ ID NO: 16886 - RNA, 21 nt, RNAi-sense strand
cuacuccuagacugacuaguu

SEQ ID NO: 16887 - RNA, 21 nt, RNAi-antisense strand
cuagucagucuaggaguaguu

SEQ ID NO: 16888 - DNA, 21 bp, Homo sapiens
aacctgacagcaaacacagtc

SEQ ID NO: 16889 - RNA, 21 nt, RNAi-sense strand
ccugacagcaaacacagucuu

SEQ ID NO: 16890 - RNA, 21 nt, RNAi-antisense strand
gacuguguuugcugucagguu

SEQ ID NO: 16891 - DNA, 21 bp, Homo sapiens
aaacacagtcactgttggttc

SEQ ID NO: 16892 - RNA, 21 nt, RNAi-sense strand
acacagucacuguugguucuu

SEQ ID NO: 16893 - RNA, 21 nt, RNAi-antisense strand
gaaccaacagugacuguguuu

SEQ ID NO: 16894 - DNA, 21 bp, Homo sapiens
aacacagtcactgttggttcc

SEQ ID NO: 16895 - RNA, 21 nt, RNAi-sense strand
cacagucacuguugguuccuu

SEQ ID NO: 16896 - RNA, 21 nt, RNAi-antisense strand
ggaaccaacagugacuguguu

SEQ ID NO: 16897 - DNA, 21 bp, Homo sapiens
aaagctcgtagaaacaagaca

SEQ ID NO: 16898 - RNA, 21 nt, RNAi-sense strand
agcucguagaaacaagacauu

SEQ ID NO: 16899 - RNA, 21 nt, RNAi-antisense strand
ugucuuguuucuacgagcuuu

SEQ ID NO: 16900 - DNA, 21 bp, Homo sapiens
aagctcgtagaaacaagacaa

SEQ ID NO: 16901 - RNA, 21 nt, RNAi-sense strand
gcucguagaaacaagacaauu

SEQ ID NO: 16902 - RNA, 21 nt, RNAi-antisense strand
uugucuuguuucuacgagcuu

SEQ ID NO: 16903 - DNA, 21 bp, Homo sapiens
aaacaagacaaggtgcaccgg

SEQ ID NO: 16904 - RNA, 21 nt, RNAi-sense strand
acaagacaaggugcaccgguu

SEQ ID NO: 16905 - RNA, 21 nt, RNAi-antisense strand
ccggugcaccuugucuuguuu

SEQ ID NO: 16906 - DNA, 21 bp, Homo sapiens
aacaagacaaggtgcaccggt

SEQ ID NO: 16907 - RNA, 21 nt, RNAi-sense strand
caagacaaggugcaccgguuu

SEQ ID NO: 16908 - RNA, 21 nt, RNAi-antisense strand
accggugcaccuugucuuguu

SEQ ID NO: 16909 - DNA, 21 bp, Homo sapiens
aagacaaggtgcaccggtttc

SEQ ID NO: 16910 - RNA, 21 nt, RNAi-sense strand
gacaaggugcaccgguuucuu

SEQ ID NO: 16911 - RNA, 21 nt, RNAi-antisense strand
gaaaccggugcaccuugucuu

SEQ ID NO: 16912 - DNA, 21 bp, Homo sapiens
aaggtgcaccggtttcataga

SEQ ID NO: 16913 - RNA, 21 nt, RNAi-sense strand
ggugcaccgguuucauagauu

SEQ ID NO: 16914 - RNA, 21 nt, RNAi-antisense strand
ucuaugaaaccggugcaccuu

SEQ ID NO: 16915 - DNA, 21 bp, Homo sapiens
catgtcctttgtgaaggagac

SEQ ID NO: 16916 - RNA, 21 nt, RNAi-sense strand
uguccuuugugaaggagacuu

SEQ ID NO: 16917 - RNA, 21 nt, RNAi-antisense strand
gucuccuucacaaaggacauu

SEQ ID NO: 16918 - DNA, 21 bp, Homo sapiens
caagctgttgaaaggctacga

SEQ ID NO: 16919 - RNA, 21 nt, RNAi-sense strand
agcuguugaaaggcuacgauu

SEQ ID NO: 16920 - RNA, 21 nt, RNAi-antisense strand
ucguagccuuucaacagcuuu

SEQ ID NO: 16921 - DNA, 21 bp, Homo sapiens
catcgacatcgccagcatcga

SEQ ID NO: 16922 - RNA, 21 nt, RNAi-sense strand
ucgacaucgccagcaucgauu

SEQ ID NO: 16923 - RNA, 21 nt, RNAi-antisense strand
ucgaugcuggcgaugucgauu

SEQ ID NO: 16924 - DNA, 21 bp, Homo sapiens
catcgccagcatcgacatggt

SEQ ID NO: 16925 - RNA, 21 nt, RNAi-sense strand
ucgccagcaucgacaugguuu

SEQ ID NO: 16926 - RNA, 21 nt, RNAi-antisense strand
accaugucgaugcuggcgauu

SEQ ID NO: 16927 - DNA, 21 bp, Homo sapiens
cagcatcgacatggtttccga

SEQ ID NO: 16928 - RNA, 21 nt, RNAi-sense strand
gcaucgacaugguuuccgauu

SEQ ID NO: 16929 - RNA, 21 nt, RNAi-antisense strand
ucggaaaccaugucgaugcuu

SEQ ID NO: 16930 - DNA, 21 bp, Homo sapiens
catcgacatggtttccgaagt

SEQ ID NO: 16931 - RNA, 21 nt, RNAi-sense strand
ucgacaugguuuccgaaguuu

SEQ ID NO: 16932 - RNA, 21 nt, RNAi-antisense strand
acuucggaaaccaugucgauu

SEQ ID NO: 16933 - DNA, 21 bp, Homo sapiens
catggtttccgaagtcaacat

SEQ ID NO: 16934 - RNA, 21 nt, RNAi-sense strand
ugguuuccgaagucaacauuu

SEQ ID NO: 16935 - RNA, 21 nt, RNAi-antisense strand
auguugacuucggaaaccauu

SEQ ID NO: 16936 - DNA, 21 bp, Homo sapiens
caacatggattataccttaac

SEQ ID NO: 16937 - RNA, 21 nt, RNAi-sense strand
acauggauuauaccuuaacuu

SEQ ID NO: 16938 - RNA, 21 nt, RNAi-antisense strand
guuaagguauaauccauguuu

SEQ ID NO: 16939 - DNA, 21 bp, Homo sapiens
catggattataccttaaccat

SEQ ID NO: 16940 - RNA, 21 nt, RNAi-sense strand
uggauuauaccuuaaccauuu

SEQ ID NO: 16941 - RNA, 21 nt, RNAi-antisense strand
augguuaagguauaauccauu

SEQ ID NO: 16942 - DNA, 21 bp, Homo sapiens
caacctcacgcttgacaatcg

SEQ ID NO: 16943 - RNA, 21 nt, RNAi-sense strand
accucacgcuugacaaucguu

SEQ ID NO: 16944 - RNA, 21 nt, RNAi-antisense strand
cgauugucaagcgugagguuu

SEQ ID NO: 16945 - DNA, 21 bp, Homo sapiens
cacgcttgacaatcgagtggc

SEQ ID NO: 16946 - RNA, 21 nt, RNAi-sense strand
cgcuugacaaucgaguggcuu

SEQ ID NO: 16947 - RNA, 21 nt, RNAi-antisense strand
gccacucgauugucaagcguu

SEQ ID NO: 16948 - DNA, 21 bp, Homo sapiens
caatcgagtggctgaccagct

SEQ ID NO: 16949 - RNA, 21 nt, RNAi-sense strand
aucgaguggcugaccagcuuu

SEQ ID NO: 16950 - RNA, 21 nt, RNAi-antisense strand
agcuggucagccacucgauuu

SEQ ID NO: 16951 - DNA, 21 bp, Homo sapiens
catttgtgcatggagtgacag

SEQ ID NO: 16952 - RNA, 21 nt, RNAi-sense strand
uuugugcauggagugacaguu

SEQ ID NO: 16953 - RNA, 21 nt, RNAi-antisense strand
cugucacuccaugcacaaauu

SEQ ID NO: 16954 - DNA, 21 bp, Homo sapiens
cagaatcaccacgacagcagc

SEQ ID NO: 16955 - RNA, 21 nt, RNAi-sense strand
gaaucaccacgacagcagcuu

SEQ ID NO: 16956 - RNA, 21 nt, RNAi-antisense strand
gcugcugucguggugauucuu

SEQ ID NO: 16957 - DNA, 21 bp, Homo sapiens
caccacgacagcagcatgcat

SEQ ID NO: 16958 - RNA, 21 nt, RNAi-sense strand
ccacgacagcagcaugcauuu

SEQ ID NO: 16959 - RNA, 21 nt, RNAi-antisense strand
augcaugcugcugucgugguu

SEQ ID NO: 16960 - DNA, 21 bp, Homo sapiens
cacgacagcagcatgcatgat

SEQ ID NO: 16961 - RNA, 21 nt, RNAi-sense strand
cgacagcagcaugcaugauuu

SEQ ID NO: 16962 - RNA, 21 nt, RNAi-antisense strand
aucaugcaugcugcugucguu

SEQ ID NO: 16963 - DNA, 21 bp, Homo sapiens
cagcagcatgcatgatggacc

SEQ ID NO: 16964 - RNA, 21 nt, RNAi-sense strand
gcagcaugcaugauggaccuu

SEQ ID NO: 16965 - RNA, 21 nt, RNAi-antisense strand
gguccaucaugcaugcugcuu

SEQ ID NO: 16966 - DNA, 21 bp, Homo sapiens
cagcatgcatgatggacctca

SEQ ID NO: 16967 - RNA, 21 nt, RNAi-sense strand
gcaugcaugauggaccucauu

SEQ ID NO: 16968 - RNA, 21 nt, RNAi-antisense strand
ugagguccaucaugcaugcuu

SEQ ID NO: 16969 - DNA, 21 bp, Homo sapiens
catgcatgatggacctcagga

SEQ ID NO: 16970 - RNA, 21 nt, RNAi-sense strand
ugcaugauggaccucaggauu

SEQ ID NO: 16971 - RNA, 21 nt, RNAi-antisense strand
uccugagguccaucaugcauu

SEQ ID NO: 16972 - DNA, 21 bp, Homo sapiens
catgatggacctcaggagata

SEQ ID NO: 16973 - RNA, 21 nt, RNAi-sense strand
ugauggaccucaggagauauu

SEQ ID NO: 16974 - RNA, 21 nt, RNAi-antisense strand
uaucuccugagguccaucauu

SEQ ID NO: 16975 - DNA, 21 bp, Homo sapiens
cagaactgcactctggaaatt

SEQ ID NO: 16976 - RNA, 21 nt, RNAi-sense strand
gaacugcacucuggaaauuuu

SEQ ID NO: 16977 - RNA, 21 nt, RNAi-antisense strand
aauuuccagagugcaguucuu

SEQ ID NO: 16978 - DNA, 21 bp, Homo sapiens
cactctggaaattgaaagcta

SEQ ID NO: 16979 - RNA, 21 nt, RNAi-sense strand
cucuggaaauugaaagcuauu

SEQ ID NO: 16980 - RNA, 21 nt, RNAi-antisense strand
uagcuuucaauuuccagaguu

SEQ ID NO: 16981 - DNA, 21 bp, Homo sapiens
caccacggatgacattgagtt

SEQ ID NO: 16982 - RNA, 21 nt, RNAi-sense strand
ccacggaugacauugaguuuu

SEQ ID NO: 16983 - RNA, 21 nt, RNAi-antisense strand
aacucaaugucauccgugguu

SEQ ID NO: 16984 - DNA, 21 bp, Homo sapiens
caaggctgttaccggagtgga

SEQ ID NO: 16985 - RNA, 21 nt, RNAi-sense strand
aggcuguuaccggaguggauu

SEQ ID NO: 16986 - RNA, 21 nt, RNAi-antisense strand
uccacuccgguaacagccuuu

SEQ ID NO: 16987 - DNA, 21 bp, Homo sapiens
cagttctccatcgtggagcac

SEQ ID NO: 16988 - RNA, 21 nt, RNAi-sense strand
guucuccaucguggagcacuu

SEQ ID NO: 16989 - RNA, 21 nt, RNAi-antisense strand
gugcuccacgauggagaacuu

SEQ ID NO: 16990 - DNA, 21 bp, Homo sapiens
catcgtggagcaccgtctggt

SEQ ID NO: 16991 - RNA, 21 nt, RNAi-sense strand
ucguggagcaccgucugguuu

SEQ ID NO: 16992 - RNA, 21 nt, RNAi-antisense strand
accagacggugcuccacgauu

SEQ ID NO: 16993 - DNA, 21 bp, Homo sapiens
caccgtctggtctcgaggaat

SEQ ID NO: 16994 - RNA, 21 nt, RNAi-sense strand
ccgucuggucucgaggaauuu

SEQ ID NO: 16995 - RNA, 21 nt, RNAi-antisense strand
auuccucgagaccagacgguu

SEQ ID NO: 16996 - DNA, 21 bp, Homo sapiens
cacaggtgcctatcctcgact

SEQ ID NO: 16997 - RNA, 21 nt, RNAi-sense strand
caggugccuauccucgacuuu

SEQ ID NO: 16998 - RNA, 21 nt, RNAi-antisense strand
agucgaggauaggcaccuguu

SEQ ID NO: 16999 - DNA, 21 bp, Homo sapiens
caggtgcctatcctcgactgt

SEQ ID NO: 17000 - RNA, 21 nt, RNAi-sense strand
ggugccuauccucgacuguuu

SEQ ID NO: 17001 - RNA, 21 nt, RNAi-antisense strand
acagucgaggauaggcaccuu

SEQ ID NO: 17002 - DNA, 21 bp, Homo sapiens
cactgagctttcggttgaaga

SEQ ID NO: 17003 - RNA, 21 nt, RNAi-sense strand
cugagcuuucgguugaagauu

SEQ ID NO: 17004 - RNA, 21 nt, RNAi-antisense strand
ucuucaaccgaaagcucaguu

SEQ ID NO: 17005 - DNA, 21 bp, Homo sapiens
cattggatacttcattcttca

SEQ ID NO: 17006 - RNA, 21 nt, RNAi-sense strand
uuggauacuucauucuucauu

SEQ ID NO: 17007 - RNA, 21 nt, RNAi-antisense strand
ugaagaaugaaguauccaauu

SEQ ID NO: 17008 - DNA, 21 bp, Homo sapiens
cattcttcagacttatatgcc

SEQ ID NO: 17009 - RNA, 21 nt, RNAi-sense strand
uucuucagacuuauaugccuu

SEQ ID NO: 17010 - RNA, 21 nt, RNAi-antisense strand
ggcauauaagucugaagaauu

SEQ ID NO: 17011 - DNA, 21 bp, Homo sapiens
caattatgatgcatctgctgc

SEQ ID NO: 17012 - RNA, 21 nt, RNAi-sense strand
auuaugaugcaucugcugcuu

SEQ ID NO: 17013 - RNA, 21 nt, RNAi-antisense strand
gcagcagaugcaucauaauuu

SEQ ID NO: 17014 - DNA, 21 bp, Homo sapiens
cacaactgtgctgacaatgac

SEQ ID NO: 17015 - RNA, 21 nt, RNAi-sense strand
caacugugcugacaaugacuu

SEQ ID NO: 17016 - RNA, 21 nt, RNAi-antisense strand
gucauugucagcacaguuguu

SEQ ID NO: 17017 - DNA, 21 bp, Homo sapiens
caactgtgctgacaatgacaa

SEQ ID NO: 17018 - RNA, 21 nt, RNAi-sense strand
acugugcugacaaugacaauu

SEQ ID NO: 17019 - RNA, 21 nt, RNAi-antisense strand
uugucauugucagcacaguuu

SEQ ID NO: 17020 - DNA, 21 bp, Homo sapiens
caaagccattgacatgtacct

SEQ ID NO: 17021 - RNA, 21 nt, RNAi-sense strand
aagccauugacauguaccuuu

SEQ ID NO: 17022 - RNA, 21 nt, RNAi-antisense strand
agguacaugucaauggcuuuu

SEQ ID NO: 17023 - DNA, 21 bp, Homo sapiens
caaaggcagaagaagcttgca

SEQ ID NO: 17024 - RNA, 21 nt, RNAi-sense strand
aaggcagaagaagcuugcauu

SEQ ID NO: 17025 - RNA, 21 nt, RNAi-antisense strand
ugcaagcuucuucugccuuuu

SEQ ID NO: 17026 - DNA, 21 bp, Homo sapiens
cagccaaggcaaagaatgacc

SEQ ID NO: 17027 - RNA, 21 nt, RNAi-sense strand
gccaaggcaaagaaugaccuu

SEQ ID NO: 17028 - RNA, 21 nt, RNAi-antisense strand
ggucauucuuugccuuggcuu

SEQ ID NO: 17029 - DNA, 21 bp, Homo sapiens
caaggcaaagaatgaccgttc

SEQ ID NO: 17030 - RNA, 21 nt, RNAi-sense strand
aggcaaagaaugaccguucuu

SEQ ID NO: 17031 - RNA, 21 nt, RNAi-antisense strand
gaacggucauucuuugccuuu

SEQ ID NO: 17032 - DNA, 21 bp, Homo sapiens
caaagaatgaccgttcaaaga

SEQ ID NO: 17033 - RNA, 21 nt, RNAi-sense strand
aagaaugaccguucaaagauu

SEQ ID NO: 17034 - RNA, 21 nt, RNAi-antisense strand
ucuuugaacggucauucuuuu

SEQ ID NO: 17035 - DNA, 21 bp, Homo sapiens
catggaaatattctgttgaca

SEQ ID NO: 17036 - RNA, 21 nt, RNAi-sense strand
uggaaauauucuguugacauu

SEQ ID NO: 17037 - RNA, 21 nt, RNAi-antisense strand
ugucaacagaauauuuccauu

SEQ ID NO: 17038 - DNA, 21 bp, Homo sapiens
catcgctggaagttcacaatg

SEQ ID NO: 17039 - RNA, 21 nt, RNAi-sense strand
ucgcuggaaguucacaauguu

SEQ ID NO: 17040 - RNA, 21 nt, RNAi-antisense strand
cauugugaacuuccagcgauu

SEQ ID NO: 17041 - DNA, 21 bp, Homo sapiens
cacaatgaaatgaatgaggtc

SEQ ID NO: 17042 - RNA, 21 nt, RNAi-sense strand
caaugaaaugaaugaggucuu

SEQ ID NO: 17043 - RNA, 21 nt, RNAi-antisense strand
gaccucauucauuucauuguu

SEQ ID NO: 17044 - DNA, 21 bp, Homo sapiens
caatgaaatgaatgaggtctc

SEQ ID NO: 17045 - RNA, 21 nt, RNAi-sense strand
augaaaugaaugaggucucuu

SEQ ID NO: 17046 - RNA, 21 nt, RNAi-antisense strand
gagaccucauucauuucauuu

SEQ ID NO: 17047 - DNA, 21 bp, Homo sapiens
caggcggcattggcgatacca

SEQ ID NO: 17048 - RNA, 21 nt, RNAi-sense strand
ggcggcauuggcgauaccauu

SEQ ID NO: 17049 - RNA, 21 nt, RNAi-antisense strand
ugguaucgccaaugccgccuu

SEQ ID NO: 17050 - DNA, 21 bp, Homo sapiens
cattggcgataccaggaattc

SEQ ID NO: 17051 - RNA, 21 nt, RNAi-sense strand
uuggcgauaccaggaauucuu

SEQ ID NO: 17052 - RNA, 21 nt, RNAi-antisense strand
gaauuccugguaucgccaauu

SEQ ID NO: 17053 - DNA, 21 bp, Homo sapiens
caggaattcagcaatatcctt

SEQ ID NO: 17054 - RNA, 21 nt, RNAi-sense strand
ggaauucagcaauauccuuuu

SEQ ID NO: 17055 - RNA, 21 nt, RNAi-antisense strand
aaggauauugcugaauuccuu

SEQ ID NO: 17056 - DNA, 21 bp, Homo sapiens
cagcaatatcctttgacaact

SEQ ID NO: 17057 - RNA, 21 nt, RNAi-sense strand
gcaauauccuuugacaacuuu

SEQ ID NO: 17058 - RNA, 21 nt, RNAi-antisense strand
aguugucaaaggauauugcuu

SEQ ID NO: 17059 - DNA, 21 bp, Homo sapiens
caatatcctttgacaactcag

SEQ ID NO: 17060 - RNA, 21 nt, RNAi-sense strand
auauccuuugacaacucaguu

SEQ ID NO: 17061 - RNA, 21 nt, RNAi-antisense strand
cugaguugucaaaggauauuu

SEQ ID NO: 17062 - DNA, 21 bp, Homo sapiens
caactcaggaatccagtacag

SEQ ID NO: 17063 - RNA, 21 nt, RNAi-sense strand
acucaggaauccaguacaguu

SEQ ID NO: 17064 - RNA, 21 nt, RNAi-antisense strand
cuguacuggauuccugaguuu

SEQ ID NO: 17065 - DNA, 21 bp, Homo sapiens
caggaatccagtacaggaaac

SEQ ID NO: 17066 - RNA, 21 nt, RNAi-sense strand
ggaauccaguacaggaaacuu

SEQ ID NO: 17067 - RNA, 21 nt, RNAi-antisense strand
guuuccuguacuggauuccuu

SEQ ID NO: 17068 - DNA, 21 bp, Homo sapiens
cagtacaggaaacagagcatg

SEQ ID NO: 17069 - RNA, 21 nt, RNAi-sense strand
guacaggaaacagagcauguu

SEQ ID NO: 17070 - RNA, 21 nt, RNAi-antisense strand
caugcucuguuuccuguacuu

SEQ ID NO: 17071 - DNA, 21 bp, Homo sapiens
caggaaacagagcatgcctcg

SEQ ID NO: 17072 - RNA, 21 nt, RNAi-sense strand
ggaaacagagcaugccucguu

SEQ ID NO: 17073 - RNA, 21 nt, RNAi-antisense strand
cgaggcaugcucuguuuccuu

SEQ ID NO: 17074 - DNA, 21 bp, Homo sapiens
catctacggaggaggtcttca

SEQ ID NO: 17075 - RNA, 21 nt, RNAi-sense strand
ucuacggaggaggucuucauu

SEQ ID NO: 17076 - RNA, 21 nt, RNAi-antisense strand
ugaagaccuccuccguagauu

SEQ ID NO: 17077 - DNA, 21 bp, Homo sapiens
catagacagatggtccaggat

SEQ ID NO: 17078 - RNA, 21 nt, RNAi-sense strand
uagacagaugguccaggauuu

SEQ ID NO: 17079 - RNA, 21 nt, RNAi-antisense strand
auccuggaccaucugucuauu

SEQ ID NO: 17080 - DNA, 21 bp, Homo sapiens
cagatggtccaggatcgtgtt

SEQ ID NO: 17081 - RNA, 21 nt, RNAi-sense strand
gaugguccaggaucguguuuu

SEQ ID NO: 17082 - RNA, 21 nt, RNAi-antisense strand
aacacgauccuggaccaucuu

SEQ ID NO: 17083 - DNA, 21 bp, Homo sapiens
caggatcgtgtttccattcac

SEQ ID NO: 17084 - RNA, 21 nt, RNAi-sense strand
ggaucguguuuccauucacuu

SEQ ID NO: 17085 - RNA, 21 nt, RNAi-antisense strand
gugaauggaaacacgauccuu

SEQ ID NO: 17086 - DNA, 21 bp, Homo sapiens
caacttagtttactggctgta

SEQ ID NO: 17087 - RNA, 21 nt, RNAi-sense strand
acuuaguuuacuggcuguauu

SEQ ID NO: 17088 - RNA, 21 nt, RNAi-antisense strand
uacagccaguaaacuaaguuu

SEQ ID NO: 17089 - DNA, 21 bp, Homo sapiens
caaagacttcatttaacactg

SEQ ID NO: 17090 - RNA, 21 nt, RNAi-sense strand
aagacuucauuuaacacuguu

SEQ ID NO: 17091 - RNA, 21 nt, RNAi-antisense strand
caguguuaaaugaagucuuuu

SEQ ID NO: 17092 - DNA, 21 bp, Homo sapiens
cactgagtgaaatattactct

SEQ ID NO: 17093 - RNA, 21 nt, RNAi-sense strand
cugagugaaauauuacucuuu

SEQ ID NO: 17094 - RNA, 21 nt, RNAi-antisense strand
agaguaauauuucacucaguu

SEQ ID NO: 17095 - DNA, 21 bp, Homo sapiens
cacacacagacacacaagcag

SEQ ID NO: 17096 - RNA, 21 nt, RNAi-sense strand
cacacagacacacaagcaguu

SEQ ID NO: 17097 - RNA, 21 nt, RNAi-antisense strand
cugcuugugugucuguguguu

SEQ ID NO: 17098 - DNA, 21 bp, Homo sapiens
cacacagacacacaagcagac

SEQ ID NO: 17099 - RNA, 21 nt, RNAi-sense strand
cacagacacacaagcagacuu

SEQ ID NO: 17100 - RNA, 21 nt, RNAi-antisense strand
gucugcuugugugucuguguu

SEQ ID NO: 17101 - DNA, 21 bp, Homo sapiens
cacagacacacaagcagacac

SEQ ID NO: 17102 - RNA, 21 nt, RNAi-sense strand
cagacacacaagcagacacuu

SEQ ID NO: 17103 - RNA, 21 nt, RNAi-antisense strand
gugucugcuugugugucuguu

SEQ ID NO: 17104 - DNA, 21 bp, Homo sapiens
cagacacacaagcagacacac

SEQ ID NO: 17105 - RNA, 21 nt, RNAi-sense strand
gacacacaagcagacacacuu

SEQ ID NO: 17106 - RNA, 21 nt, RNAi-antisense strand
gugugucugcuugugugucuu

SEQ ID NO: 17107 - DNA, 21 bp, Homo sapiens
cacacaagcagacacacacat

SEQ ID NO: 17108 - RNA, 21 nt, RNAi-sense strand
cacaagcagacacacacauuu

SEQ ID NO: 17109 - RNA, 21 nt, RNAi-antisense strand
augugugugucugcuuguguu

SEQ ID NO: 17110 - DNA, 21 bp, Homo sapiens
cacaagcagacacacacatat

SEQ ID NO: 17111 - RNA, 21 nt, RNAi-sense strand
caagcagacacacacauauuu

SEQ ID NO: 17112 - RNA, 21 nt, RNAi-antisense strand
auaugugugugucugcuuguu

SEQ ID NO: 17113 - DNA, 21 bp, Homo sapiens
caagcagacacacacatatat

SEQ ID NO: 17114 - RNA, 21 nt, RNAi-sense strand
agcagacacacacauauauuu

SEQ ID NO: 17115 - RNA, 21 nt, RNAi-antisense strand
auauaugugugugucugcuuu

SEQ ID NO: 17116 - DNA, 21 bp, Homo sapiens
cagacacacacatatatacat

SEQ ID NO: 17117 - RNA, 21 nt, RNAi-sense strand
gacacacacauauauacauuu

SEQ ID NO: 17118 - RNA, 21 nt, RNAi-antisense strand
auguauauaugugugugucuu

SEQ ID NO: 17119 - DNA, 21 bp, Homo sapiens
cacacacatatatacatacgc

SEQ ID NO: 17120 - RNA, 21 nt, RNAi-sense strand
cacacauauauacauacgcuu

SEQ ID NO: 17121 - RNA, 21 nt, RNAi-antisense strand
gcguauguauauauguguguu

SEQ ID NO: 17122 - DNA, 21 bp, Homo sapiens
cacacatatatacatacgcaa

SEQ ID NO: 17123 - RNA, 21 nt, RNAi-sense strand
cacauauauacauacgcaauu

SEQ ID NO: 17124 - RNA, 21 nt, RNAi-antisense strand
uugcguauguauauauguguu

SEQ ID NO: 17125 - DNA, 21 bp, Homo sapiens
cacgtgtatatgaggatgtat

SEQ ID NO: 17126 - RNA, 21 nt, RNAi-sense strand
cguguauaugaggauguauuu

SEQ ID NO: 17127 - RNA, 21 nt, RNAi-antisense strand
auacauccucauauacacguu

SEQ ID NO: 17128 - DNA, 21 bp, Homo sapiens
catgtgtatggaagacaaata

SEQ ID NO: 17129 - RNA, 21 nt, RNAi-sense strand
uguguauggaagacaaauauu

SEQ ID NO: 17130 - RNA, 21 nt, RNAi-antisense strand
uauuugucuuccauacacauu

SEQ ID NO: 17131 - DNA, 21 bp, Homo sapiens
cagctatggacaatttaccac

SEQ ID NO: 17132 - RNA, 21 nt, RNAi-sense strand
gcuauggacaauuuaccacuu

SEQ ID NO: 17133 - RNA, 21 nt, RNAi-antisense strand
gugguaaauuguccauagcuu

SEQ ID NO: 17134 - DNA, 21 bp, Homo sapiens
caatttaccacaggatgcata

SEQ ID NO: 17135 - RNA, 21 nt, RNAi-sense strand
auuuaccacaggaugcauauu

SEQ ID NO: 17136 - RNA, 21 nt, RNAi-antisense strand
uaugcauccugugguaaauuu

SEQ ID NO: 17137 - DNA, 21 bp, Homo sapiens
cacaggatgcatattaaagaa

SEQ ID NO: 17138 - RNA, 21 nt, RNAi-sense strand
caggaugcauauuaaagaauu

SEQ ID NO: 17139 - RNA, 21 nt, RNAi-antisense strand
uucuuuaauaugcauccuguu

SEQ ID NO: 17140 - DNA, 21 bp, Homo sapiens
caggatgcatattaaagaaag

SEQ ID NO: 17141 - RNA, 21 nt, RNAi-sense strand
ggaugcauauuaaagaaaguu

SEQ ID NO: 17142 - RNA, 21 nt, RNAi-antisense strand
cuuucuuuaauaugcauccuu

SEQ ID NO: 17143 - DNA, 21 bp, Homo sapiens
catacagtggtattgctagtt

SEQ ID NO: 17144 - RNA, 21 nt, RNAi-sense strand
uacagugguauugcuaguuuu

SEQ ID NO: 17145 - RNA, 21 nt, RNAi-antisense strand
aacuagcaauaccacuguauu

SEQ ID NO: 17146 - DNA, 21 bp, Homo sapiens
cagtggtattgctagtttaaa

SEQ ID NO: 17147 - RNA, 21 nt, RNAi-sense strand
gugguauugcuaguuuaaauu

SEQ ID NO: 17148 - RNA, 21 nt, RNAi-antisense strand
uuuaaacuagcaauaccacuu

SEQ ID NO: 17149 - DNA, 21 bp, Homo sapiens
cacttacttcatatcctctcg

SEQ ID NO: 17150 - RNA, 21 nt, RNAi-sense strand
cuuacuucauauccucucguu

SEQ ID NO: 17151 - RNA, 21 nt, RNAi-antisense strand
cgagaggauaugaaguaaguu

SEQ ID NO: 17152 - DNA, 21 bp, Homo sapiens
catatcctctcgttcagttta

SEQ ID NO: 17153 - RNA, 21 nt, RNAi-sense strand
uauccucucguucaguuuauu

SEQ ID NO: 17154 - RNA, 21 nt, RNAi-antisense strand
uaaacugaacgagaggauauu

SEQ ID NO: 17155 - DNA, 21 bp, Homo sapiens
cagtttagtaagcaaaggctt

SEQ ID NO: 17156 - RNA, 21 nt, RNAi-sense strand
guuuaguaagcaaaggcuuuu

SEQ ID NO: 17157 - RNA, 21 nt, RNAi-antisense strand
aagccuuugcuuacuaaacuu

SEQ ID NO: 17158 - DNA, 21 bp, Homo sapiens
caaaggcttcttggcttctct

SEQ ID NO: 17159 - RNA, 21 nt, RNAi-sense strand
aaggcuucuuggcuucucuuu

SEQ ID NO: 17160 - RNA, 21 nt, RNAi-antisense strand
agagaagccaagaagccuuuu

SEQ ID NO: 17161 - DNA, 21 bp, Homo sapiens
cactggcagtgtgcttacctg

SEQ ID NO: 17162 - RNA, 21 nt, RNAi-sense strand
cuggcagugugcuuaccuguu

SEQ ID NO: 17163 - RNA, 21 nt, RNAi-antisense strand
cagguaagcacacugccaguu

SEQ ID NO: 17164 - DNA, 21 bp, Homo sapiens
cagtgtgcttacctgttgtct

SEQ ID NO: 17165 - RNA, 21 nt, RNAi-sense strand
gugugcuuaccuguugucuuu

SEQ ID NO: 17166 - RNA, 21 nt, RNAi-antisense strand
agacaacagguaagcacacuu

SEQ ID NO: 17167 - DNA, 21 bp, Homo sapiens
cacgttgatgtctgaacgacc

SEQ ID NO: 17168 - RNA, 21 nt, RNAi-sense strand
cguugaugucugaacgaccuu

SEQ ID NO: 17169 - RNA, 21 nt, RNAi-antisense strand
ggucguucagacaucaacguu

SEQ ID NO: 17170 - DNA, 21 bp, Homo sapiens
catctcgttgtaagtactcta

SEQ ID NO: 17171 - RNA, 21 nt, RNAi-sense strand
ucucguuguaaguacucuauu

SEQ ID NO: 17172 - RNA, 21 nt, RNAi-antisense strand
uagaguacuuacaacgagauu

SEQ ID NO: 17173 - DNA, 21 bp, Homo sapiens
cagtgtgtagtttgtttctgt

SEQ ID NO: 17174 - RNA, 21 nt, RNAi-sense strand
guguguaguuuguuucuguuu

SEQ ID NO: 17175 - RNA, 21 nt, RNAi-antisense strand
acagaaacaaacuacacacuu

SEQ ID NO: 17176 - DNA, 21 bp, Homo sapiens
cacttggagtggatccagctt

SEQ ID NO: 17177 - RNA, 21 nt, RNAi-sense strand
cuuggaguggauccagcuuuu

SEQ ID NO: 17178 - RNA, 21 nt, RNAi-antisense strand
aagcuggauccacuccaaguu

SEQ ID NO: 17179 - DNA, 21 bp, Homo sapiens
cagcttcactgtcatgtgcga

SEQ ID NO: 17180 - RNA, 21 nt, RNAi-sense strand
gcuucacugucaugugcgauu

SEQ ID NO: 17181 - RNA, 21 nt, RNAi-antisense strand
ucgcacaugacagugaagcuu

SEQ ID NO: 17182 - DNA, 21 bp, Homo sapiens
cactgtcatgtgcgaacacag

SEQ ID NO: 17183 - RNA, 21 nt, RNAi-sense strand
cugucaugugcgaacacaguu

SEQ ID NO: 17184 - RNA, 21 nt, RNAi-antisense strand
cuguguucgcacaugacaguu

SEQ ID NO: 17185 - DNA, 21 bp, Homo sapiens
catgtgcgaacacagtgacac

SEQ ID NO: 17186 - RNA, 21 nt, RNAi-sense strand
ugugcgaacacagugacacuu

SEQ ID NO: 17187 - RNA, 21 nt, RNAi-antisense strand
gugucacuguguucgcacauu

SEQ ID NO: 17188 - DNA, 21 bp, Homo sapiens
cacagtgacacgtttggccag

SEQ ID NO: 17189 - RNA, 21 nt, RNAi-sense strand
cagugacacguuuggccaguu

SEQ ID NO: 17190 - RNA, 21 nt, RNAi-antisense strand
cuggccaaacgugucacuguu

SEQ ID NO: 17191 - DNA, 21 bp, Homo sapiens
cagtgacacgtttggccagtg

SEQ ID NO: 17192 - RNA, 21 nt, RNAi-sense strand
gugacacguuuggccaguguu

SEQ ID NO: 17193 - RNA, 21 nt, RNAi-antisense strand
cacuggccaaacgugucacuu

SEQ ID NO: 17194 - DNA, 21 bp, Homo sapiens
cacgtttggccagtgacattt

SEQ ID NO: 17195 - RNA, 21 nt, RNAi-sense strand
cguuuggccagugacauuuuu

SEQ ID NO: 17196 - RNA, 21 nt, RNAi-antisense strand
aaaugucacuggccaaacguu

SEQ ID NO: 17197 - DNA, 21 bp, Homo sapiens
cagtgacatttcaatcactga

SEQ ID NO: 17198 - RNA, 21 nt, RNAi-sense strand
gugacauuucaaucacugauu

SEQ ID NO: 17199 - RNA, 21 nt, RNAi-antisense strand
ucagugauugaaaugucacuu

SEQ ID NO: 17200 - DNA, 21 bp, Homo sapiens
catctcgtatggatttctagg

SEQ ID NO: 17201 - RNA, 21 nt, RNAi-sense strand
ucucguauggauuucuagguu

SEQ ID NO: 17202 - RNA, 21 nt, RNAi-antisense strand
ccuagaaauccauacgagauu

SEQ ID NO: 17203 - DNA, 21 bp, Homo sapiens
caacagaaagcatagacgtct

SEQ ID NO: 17204 - RNA, 21 nt, RNAi-sense strand
acagaaagcauagacgucuuu

SEQ ID NO: 17205 - RNA, 21 nt, RNAi-antisense strand
agacgucuaugcuuucuguuu

SEQ ID NO: 17206 - DNA, 21 bp, Homo sapiens
cagaaagcatagacgtctcag

SEQ ID NO: 17207 - RNA, 21 nt, RNAi-sense strand
gaaagcauagacgucucaguu

SEQ ID NO: 17208 - RNA, 21 nt, RNAi-antisense strand
cugagacgucuaugcuuucuu

SEQ ID NO: 17209 - DNA, 21 bp, Homo sapiens
catagacgtctcaggttattc

SEQ ID NO: 17210 - RNA, 21 nt, RNAi-sense strand
uagacgucucagguuauucuu

SEQ ID NO: 17211 - RNA, 21 nt, RNAi-antisense strand
gaauaaccugagacgucuauu

SEQ ID NO: 17212 - DNA, 21 bp, Homo sapiens
caggttattcgttactctaag

SEQ ID NO: 17213 - RNA, 21 nt, RNAi-sense strand
gguuauucguuacucuaaguu

SEQ ID NO: 17214 - RNA, 21 nt, RNAi-antisense strand
cuuagaguaacgaauaaccuu

SEQ ID NO: 17215 - DNA, 21 bp, Homo sapiens
catggcagcatgcgatgtcat

SEQ ID NO: 17216 - RNA, 21 nt, RNAi-sense strand
uggcagcaugcgaugucauuu

SEQ ID NO: 17217 - RNA, 21 nt, RNAi-antisense strand
augacaucgcaugcugccauu

SEQ ID NO: 17218 - DNA, 21 bp, Homo sapiens
cacttctactgttcaatttca

SEQ ID NO: 17219 - RNA, 21 nt, RNAi-sense strand
cuucuacuguucaauuucauu

SEQ ID NO: 17220 - RNA, 21 nt, RNAi-antisense strand
ugaaauugaacaguagaaguu

SEQ ID NO: 17221 - DNA, 21 bp, Homo sapiens
cagaaactaagaatcatcctc

SEQ ID NO: 17222 - RNA, 21 nt, RNAi-sense strand
gaaacuaagaaucauccucuu

SEQ ID NO: 17223 - RNA, 21 nt, RNAi-antisense strand
gaggaugauucuuaguuucuu

SEQ ID NO: 17224 - DNA, 21 bp, Homo sapiens
catcctcatgcctttatttct

SEQ ID NO: 17225 - RNA, 21 nt, RNAi-sense strand
uccucaugccuuuauuucuuu

SEQ ID NO: 17226 - RNA, 21 nt, RNAi-antisense strand
agaaauaaaggcaugaggauu

SEQ ID NO: 17227 - DNA, 21 bp, Homo sapiens
catgcctttatttctgtatct

SEQ ID NO: 17228 - RNA, 21 nt, RNAi-sense strand
ugccuuuauuucuguaucuuu

SEQ ID NO: 17229 - RNA, 21 nt, RNAi-antisense strand
agauacagaaauaaaggcauu

SEQ ID NO: 17230 - DNA, 21 bp, Homo sapiens
catatttcataagcacatcca

SEQ ID NO: 17231 - RNA, 21 nt, RNAi-sense strand
uauuucauaagcacauccauu

SEQ ID NO: 17232 - RNA, 21 nt, RNAi-antisense strand
uggaugugcuuaugaaauauu

SEQ ID NO: 17233 - DNA, 21 bp, Homo sapiens
cataagcacatccaactactc

SEQ ID NO: 17234 - RNA, 21 nt, RNAi-sense strand
uaagcacauccaacuacucuu

SEQ ID NO: 17235 - RNA, 21 nt, RNAi-antisense strand
gaguaguuggaugugcuuauu

SEQ ID NO: 17236 - DNA, 21 bp, Homo sapiens
cacatccaactactcctagac

SEQ ID NO: 17237 - RNA, 21 nt, RNAi-sense strand
cauccaacuacuccuagacuu

SEQ ID NO: 17238 - RNA, 21 nt, RNAi-antisense strand
gucuaggaguaguuggauguu

SEQ ID NO: 17239 - DNA, 21 bp, Homo sapiens
catccaactactcctagactg

SEQ ID NO: 17240 - RNA, 21 nt, RNAi-sense strand
uccaacuacuccuagacuguu

SEQ ID NO: 17241 - RNA, 21 nt, RNAi-antisense strand
cagucuaggaguaguuggauu

SEQ ID NO: 17242 - DNA, 21 bp, Homo sapiens
caactactcctagactgacta

SEQ ID NO: 17243 - RNA, 21 nt, RNAi-sense strand
acuacuccuagacugacuauu

SEQ ID NO: 17244 - RNA, 21 nt, RNAi-antisense strand
uagucagucuaggaguaguuu

SEQ ID NO: 17245 - DNA, 21 bp, Homo sapiens
catgaccgttctctgaggcaa

SEQ ID NO: 17246 - RNA, 21 nt, RNAi-sense strand
ugaccguucucugaggcaauu

SEQ ID NO: 17247 - RNA, 21 nt, RNAi-antisense strand
uugccucagagaacggucauu

SEQ ID NO: 17248 - DNA, 21 bp, Homo sapiens
caacctgacagcaaacacagt

SEQ ID NO: 17249 - RNA, 21 nt, RNAi-sense strand
accugacagcaaacacaguuu

SEQ ID NO: 17250 - RNA, 21 nt, RNAi-antisense strand
acuguguuugcugucagguuu

SEQ ID NO: 17251 - DNA, 21 bp, Homo sapiens
cagcaaacacagtcactgttg

SEQ ID NO: 17252 - RNA, 21 nt, RNAi-sense strand
gcaaacacagucacuguuguu

SEQ ID NO: 17253 - RNA, 21 nt, RNAi-antisense strand
caacagugacuguguuugcuu

SEQ ID NO: 17254 - DNA, 21 bp, Homo sapiens
caaacacagtcactgttggtt

SEQ ID NO: 17255 - RNA, 21 nt, RNAi-sense strand
aacacagucacuguugguuuu

SEQ ID NO: 17256 - RNA, 21 nt, RNAi-antisense strand
aaccaacagugacuguguuuu

SEQ ID NO: 17257 - DNA, 21 bp, Homo sapiens
cacagtcactgttggttcctt

SEQ ID NO: 17258 - RNA, 21 nt, RNAi-sense strand
cagucacuguugguuccuuuu

SEQ ID NO: 17259 - RNA, 21 nt, RNAi-antisense strand
aaggaaccaacagugacuguu

SEQ ID NO: 17260 - DNA, 21 bp, Homo sapiens
cagtcactgttggttccttct

SEQ ID NO: 17261 - RNA, 21 nt, RNAi-sense strand
gucacuguugguuccuucuuu

SEQ ID NO: 17262 - RNA, 21 nt, RNAi-antisense strand
agaaggaaccaacagugacuu

SEQ ID NO: 17263 - DNA, 21 bp, Homo sapiens
cactgttggttccttctgatc

SEQ ID NO: 17264 - RNA, 21 nt, RNAi-sense strand
cuguugguuccuucugaucuu

SEQ ID NO: 17265 - RNA, 21 nt, RNAi-antisense strand
gaucagaaggaaccaacaguu

SEQ ID NO: 17266 - DNA, 21 bp, Homo sapiens
cacagcctcatcagtatttgg

SEQ ID NO: 17267 - RNA, 21 nt, RNAi-sense strand
cagccucaucaguauuugguu

SEQ ID NO: 17268 - RNA, 21 nt, RNAi-antisense strand
ccaaauacugaugaggcuguu

SEQ ID NO: 17269 - DNA, 21 bp, Homo sapiens
cagcctcatcagtatttggac

SEQ ID NO: 17270 - RNA, 21 nt, RNAi-sense strand
gccucaucaguauuuggacuu

SEQ ID NO: 17271 - RNA, 21 nt, RNAi-antisense strand
guccaaauacugaugaggcuu

SEQ ID NO: 17272 - DNA, 21 bp, Homo sapiens
caagacaaggtgcaccggttt

SEQ ID NO: 17273 - RNA, 21 nt, RNAi-sense strand
agacaaggugcaccgguuuuu

SEQ ID NO: 17274 - RNA, 21 nt, RNAi-antisense strand
aaaccggugcaccuugucuuu

SEQ ID NO: 17275 - DNA, 21 bp, Homo sapiens
caaggtgcaccggtttcatag

SEQ ID NO: 17276 - RNA, 21 nt, RNAi-sense strand
aggugcaccgguuucauaguu

SEQ ID NO: 17277 - RNA, 21 nt, RNAi-antisense strand
cuaugaaaccggugcaccuuu

SEQ ID NO: 17278 - DNA, 21 bp, Homo sapiens
caccggtttcatagacgcaac

SEQ ID NO: 17279 - RNA, 21 nt, RNAi-sense strand
ccgguuucauagacgcaacuu

SEQ ID NO: 17280 - RNA, 21 nt, RNAi-antisense strand
guugcgucuaugaaaccgguu

SEQ ID NO: 17281 - DNA, 21 bp, Homo sapiens
catagacgcaaccttaactta

SEQ ID NO: 17282 - RNA, 21 nt, RNAi-sense strand
uagacgcaaccuuaacuuauu

SEQ ID NO: 17283 - RNA, 21 nt, RNAi-antisense strand
uaaguuaagguugcgucuauu

SEQ ID NO: 17284 - DNA, 21 bp, Homo sapiens
gaacatgtcctttgtgaagga

SEQ ID NO: 17285 - RNA, 21 nt, RNAi-sense strand
acauguccuuugugaaggauu

SEQ ID NO: 17286 - RNA, 21 nt, RNAi-antisense strand
uccuucacaaaggacauguuu

SEQ ID NO: 17287 - DNA, 21 bp, Homo sapiens
gaaggagacggtggacaagct

SEQ ID NO: 17288 - RNA, 21 nt, RNAi-sense strand
aggagacgguggacaagcuuu

SEQ ID NO: 17289 - RNA, 21 nt, RNAi-antisense strand
agcuuguccaccgucuccuuu

SEQ ID NO: 17290 - DNA, 21 bp, Homo sapiens
gagacggtggacaagctgttg

SEQ ID NO: 17291 - RNA, 21 nt, RNAi-sense strand
gacgguggacaagcuguuguu

SEQ ID NO: 17292 - RNA, 21 nt, RNAi-antisense strand
caacagcuuguccaccgucuu

SEQ ID NO: 17293 - DNA, 21 bp, Homo sapiens
gacggtggacaagctgttgaa

SEQ ID NO: 17294 - RNA, 21 nt, RNAi-sense strand
cgguggacaagcuguugaauu

SEQ ID NO: 17295 - RNA, 21 nt, RNAi-antisense strand
uucaacagcuuguccaccguu

SEQ ID NO: 17296 - DNA, 21 bp, Homo sapiens
gacaagctgttgaaaggctac

SEQ ID NO: 17297 - RNA, 21 nt, RNAi-sense strand
caagcuguugaaaggcuacuu

SEQ ID NO: 17298 - RNA, 21 nt, RNAi-antisense strand
guagccuuucaacagcuuguu

SEQ ID NO: 17299 - DNA, 21 bp, Homo sapiens
gaaaggctacgacattcgcct

SEQ ID NO: 17300 - RNA, 21 nt, RNAi-sense strand
aaggcuacgacauucgccuuu

SEQ ID NO: 17301 - RNA, 21 nt, RNAi-antisense strand
aggcgaaugucguagccuuuu

SEQ ID NO: 17302 - DNA, 21 bp, Homo sapiens
gatgaacatcgacatcgccag

SEQ ID NO: 17303 - RNA, 21 nt, RNAi-sense strand
ugaacaucgacaucgccaguu

SEQ ID NO: 17304 - RNA, 21 nt, RNAi-antisense strand
cuggcgaugucgauguucauu

SEQ ID NO: 17305 - DNA, 21 bp, Homo sapiens
gaacatcgacatcgccagcat

SEQ ID NO: 17306 - RNA, 21 nt, RNAi-sense strand
acaucgacaucgccagcauuu

SEQ ID NO: 17307 - RNA, 21 nt, RNAi-antisense strand
augcuggcgaugucgauguuu

SEQ ID NO: 17308 - DNA, 21 bp, Homo sapiens
gacatcgccagcatcgacatg

SEQ ID NO: 17309 - RNA, 21 nt, RNAi-sense strand
caucgccagcaucgacauguu

SEQ ID NO: 17310 - RNA, 21 nt, RNAi-antisense strand
caugucgaugcuggcgauguu

SEQ ID NO: 17311 - DNA, 21 bp, Homo sapiens
gacatggtttccgaagtcaac

SEQ ID NO: 17312 - RNA, 21 nt, RNAi-sense strand
caugguuuccgaagucaacuu

SEQ ID NO: 17313 - RNA, 21 nt, RNAi-antisense strand
guugacuucggaaaccauguu

SEQ ID NO: 17314 - DNA, 21 bp, Homo sapiens
gaagtcaacatggattatacc

SEQ ID NO: 17315 - RNA, 21 nt, RNAi-sense strand
agucaacauggauuauaccuu

SEQ ID NO: 17316 - RNA, 21 nt, RNAi-antisense strand
gguauaauccauguugacuuu

SEQ ID NO: 17317 - DNA, 21 bp, Homo sapiens
gacaatcgagtggctgaccag

SEQ ID NO: 17318 - RNA, 21 nt, RNAi-sense strand
caaucgaguggcugaccaguu

SEQ ID NO: 17319 - RNA, 21 nt, RNAi-antisense strand
cuggucagccacucgauuguu

SEQ ID NO: 17320 - DNA, 21 bp, Homo sapiens
gaatcaccacgacagcagcat

SEQ ID NO: 17321 - RNA, 21 nt, RNAi-sense strand
aucaccacgacagcagcauuu

SEQ ID NO: 17322 - RNA, 21 nt, RNAi-antisense strand
augcugcugucguggugauuu

SEQ ID NO: 17323 - DNA, 21 bp, Homo sapiens
gacagcagcatgcatgatgga

SEQ ID NO: 17324 - RNA, 21 nt, RNAi-sense strand
cagcagcaugcaugauggauu

SEQ ID NO: 17325 - RNA, 21 nt, RNAi-antisense strand
uccaucaugcaugcugcuguu

SEQ ID NO: 17326 - DNA, 21 bp, Homo sapiens
gacgagcagaactgcactctg

SEQ ID NO: 17327 - RNA, 21 nt, RNAi-sense strand
cgagcagaacugcacucuguu

SEQ ID NO: 17328 - RNA, 21 nt, RNAi-antisense strand
cagagugcaguucugcucguu

SEQ ID NO: 17329 - DNA, 21 bp, Homo sapiens
gagcagaactgcactctggaa

SEQ ID NO: 17330 - RNA, 21 nt, RNAi-sense strand
gcagaacugcacucuggaauu

SEQ ID NO: 17331 - RNA, 21 nt, RNAi-antisense strand
uuccagagugcaguucugcuu

SEQ ID NO: 17332 - DNA, 21 bp, Homo sapiens
gaactgcactctggaaattga

SEQ ID NO: 17333 - RNA, 21 nt, RNAi-sense strand
acugcacucuggaaauugauu

SEQ ID NO: 17334 - RNA, 21 nt, RNAi-antisense strand
ucaauuuccagagugcaguuu

SEQ ID NO: 17335 - DNA, 21 bp, Homo sapiens
gaaattgaaagctatggctac

SEQ ID NO: 17336 - RNA, 21 nt, RNAi-sense strand
aauugaaagcuauggcuacuu

SEQ ID NO: 17337 - RNA, 21 nt, RNAi-antisense strand
guagccauagcuuucaauuuu

SEQ ID NO: 17338 - DNA, 21 bp, Homo sapiens
gaaagctatggctacaccacg

SEQ ID NO: 17339 - RNA, 21 nt, RNAi-sense strand
aagcuauggcuacaccacguu

SEQ ID NO: 17340 - RNA, 21 nt, RNAi-antisense strand
cgugguguagccauagcuuuu

SEQ ID NO: 17341 - DNA, 21 bp, Homo sapiens
gacaaggctgttaccggagtg

SEQ ID NO: 17342 - RNA, 21 nt, RNAi-sense strand
caaggcuguuaccggaguguu

SEQ ID NO: 17343 - RNA, 21 nt, RNAi-antisense strand
cacuccgguaacagccuuguu

SEQ ID NO: 17344 - DNA, 21 bp, Homo sapiens
gagtggaaaggattgagctcc

SEQ ID NO: 17345 - RNA, 21 nt, RNAi-sense strand
guggaaaggauugagcuccuu

SEQ ID NO: 17346 - RNA, 21 nt, RNAi-antisense strand
ggagcucaauccuuuccacuu

SEQ ID NO: 17347 - DNA, 21 bp, Homo sapiens
gaggaatgttgtcttcgccac

SEQ ID NO: 17348 - RNA, 21 nt, RNAi-sense strand
ggaauguugucuucgccacuu

SEQ ID NO: 17349 - RNA, 21 nt, RNAi-antisense strand
guggcgaagacaacauuccuu

SEQ ID NO: 17350 - DNA, 21 bp, Homo sapiens
gaatgttgtcttcgccacagg

SEQ ID NO: 17351 - RNA, 21 nt, RNAi-sense strand
auguugucuucgccacagguu

SEQ ID NO: 17352 - RNA, 21 nt, RNAi-antisense strand
ccuguggcgaagacaacauuu

SEQ ID NO: 17353 - DNA, 21 bp, Homo sapiens
gactgtcactgagctttcggt

SEQ ID NO: 17354 - RNA, 21 nt, RNAi-sense strand
cugucacugagcuuucgguuu

SEQ ID NO: 17355 - RNA, 21 nt, RNAi-antisense strand
accgaaagcucagugacaguu

SEQ ID NO: 17356 - DNA, 21 bp, Homo sapiens
gagctttcggttgaagaggaa

SEQ ID NO: 17357 - RNA, 21 nt, RNAi-sense strand
gcuuucgguugaagaggaauu

SEQ ID NO: 17358 - RNA, 21 nt, RNAi-antisense strand
uuccucuucaaccgaaagcuu

SEQ ID NO: 17359 - DNA, 21 bp, Homo sapiens
gaagaggaacattggatactt

SEQ ID NO: 17360 - RNA, 21 nt, RNAi-sense strand
agaggaacauuggauacuuuu

SEQ ID NO: 17361 - RNA, 21 nt, RNAi-antisense strand
aaguauccaauguuccucuuu

SEQ ID NO: 17362 - DNA, 21 bp, Homo sapiens
gaggaacattggatacttcat

SEQ ID NO: 17363 - RNA, 21 nt, RNAi-sense strand
ggaacauuggauacuucauuu

SEQ ID NO: 17364 - RNA, 21 nt, RNAi-antisense strand
augaaguauccaauguuccuu

SEQ ID NO: 17365 - DNA, 21 bp, Homo sapiens
gaacattggatacttcattct

SEQ ID NO: 17366 - RNA, 21 nt, RNAi-sense strand
acauuggauacuucauucuuu

SEQ ID NO: 17367 - RNA, 21 nt, RNAi-antisense strand
agaaugaaguauccaauguuu

SEQ ID NO: 17368 - DNA, 21 bp, Homo sapiens
gatacttcattcttcagactt

SEQ ID NO: 17369 - RNA, 21 nt, RNAi-sense strand
uacuucauucuucagacuuuu

SEQ ID NO: 17370 - RNA, 21 nt, RNAi-antisense strand
aagucugaagaaugaaguauu

SEQ ID NO: 17371 - DNA, 21 bp, Homo sapiens
gatcaattatgatgcatctgc

SEQ ID NO: 17372 - RNA, 21 nt, RNAi-sense strand
ucaauuaugaugcaucugcuu

SEQ ID NO: 17373 - RNA, 21 nt, RNAi-antisense strand
gcagaugcaucauaauugauu

SEQ ID NO: 17374 - DNA, 21 bp, Homo sapiens
gatgcatctgctgctagagtt

SEQ ID NO: 17375 - RNA, 21 nt, RNAi-sense strand
ugcaucugcugcuagaguuuu

SEQ ID NO: 17376 - RNA, 21 nt, RNAi-antisense strand
aacucuagcagcagaugcauu

SEQ ID NO: 17377 - DNA, 21 bp, Homo sapiens
gatcacaactgtgctgacaat

SEQ ID NO: 17378 - RNA, 21 nt, RNAi-sense strand
ucacaacugugcugacaauuu

SEQ ID NO: 17379 - RNA, 21 nt, RNAi-antisense strand
auugucagcacaguugugauu

SEQ ID NO: 17380 - DNA, 21 bp, Homo sapiens
gacaatgacaaccatcaacac

SEQ ID NO: 17381 - RNA, 21 nt, RNAi-sense strand
caaugacaaccaucaacacuu

SEQ ID NO: 17382 - RNA, 21 nt, RNAi-antisense strand
guguugaugguugucauuguu

SEQ ID NO: 17383 - DNA, 21 bp, Homo sapiens
gagtatgcctttgtcaactac

SEQ ID NO: 17384 - RNA, 21 nt, RNAi-sense strand
guaugccuuugucaacuacuu

SEQ ID NO: 17385 - RNA, 21 nt, RNAi-antisense strand
guaguugacaaaggcauacuu

SEQ ID NO: 17386 - DNA, 21 bp, Homo sapiens
gacagccaaggcaaagaatga

SEQ ID NO: 17387 - RNA, 21 nt, RNAi-sense strand
cagccaaggcaaagaaugauu

SEQ ID NO: 17388 - RNA, 21 nt, RNAi-antisense strand
ucauucuuugccuuggcuguu

SEQ ID NO: 17389 - DNA, 21 bp, Homo sapiens
gaatgaccgttcaaagagcga

SEQ ID NO: 17390 - RNA, 21 nt, RNAi-sense strand
augaccguucaaagagcgauu

SEQ ID NO: 17391 - RNA, 21 nt, RNAi-antisense strand
ucgcucuuugaacggucauuu

SEQ ID NO: 17392 - DNA, 21 bp, Homo sapiens
gaccgttcaaagagcgaaagc

SEQ ID NO: 17393 - RNA, 21 nt, RNAi-sense strand
ccguucaaagagcgaaagcuu

SEQ ID NO: 17394 - RNA, 21 nt, RNAi-antisense strand
gcuuucgcucuuugaacgguu

SEQ ID NO: 17395 - DNA, 21 bp, Homo sapiens
gatgctcatggaaatattctg

SEQ ID NO: 17396 - RNA, 21 nt, RNAi-sense strand
ugcucauggaaauauucuguu

SEQ ID NO: 17397 - RNA, 21 nt, RNAi-antisense strand
cagaauauuuccaugagcauu

SEQ ID NO: 17398 - DNA, 21 bp, Homo sapiens
gaaatattctgttgacatcgc

SEQ ID NO: 17399 - RNA, 21 nt, RNAi-sense strand
aauauucuguugacaucgcuu

SEQ ID NO: 17400 - RNA, 21 nt, RNAi-antisense strand
gcgaugucaacagaauauuuu

SEQ ID NO: 17401 - DNA, 21 bp, Homo sapiens
gacatcgctggaagttcacaa

SEQ ID NO: 17402 - RNA, 21 nt, RNAi-sense strand
caucgcuggaaguucacaauu

SEQ ID NO: 17403 - RNA, 21 nt, RNAi-antisense strand
uugugaacuuccagcgauguu

SEQ ID NO: 17404 - DNA, 21 bp, Homo sapiens
gaaatgaatgaggtctcaggc

SEQ ID NO: 17405 - RNA, 21 nt, RNAi-sense strand
aaugaaugaggucucaggcuu

SEQ ID NO: 17406 - RNA, 21 nt, RNAi-antisense strand
gccugagaccucauucauuuu

SEQ ID NO: 17407 - DNA, 21 bp, Homo sapiens
gaatgaggtctcaggcggcat

SEQ ID NO: 17408 - RNA, 21 nt, RNAi-sense strand
augaggucucaggcggcauuu

SEQ ID NO: 17409 - RNA, 21 nt, RNAi-antisense strand
augccgccugagaccucauuu

SEQ ID NO: 17410 - DNA, 21 bp, Homo sapiens
gataccaggaattcagcaata

SEQ ID NO: 17411 - RNA, 21 nt, RNAi-sense strand
uaccaggaauucagcaauauu

SEQ ID NO: 17412 - RNA, 21 nt, RNAi-antisense strand
uauugcugaauuccugguauu

SEQ ID NO: 17413 - DNA, 21 bp, Homo sapiens
gaattcagcaatatcctttga

SEQ ID NO: 17414 - RNA, 21 nt, RNAi-sense strand
auucagcaauauccuuugauu

SEQ ID NO: 17415 - RNA, 21 nt, RNAi-antisense strand
ucaaaggauauugcugaauuu

SEQ ID NO: 17416 - DNA, 21 bp, Homo sapiens
gacaactcaggaatccagtac

SEQ ID NO: 17417 - RNA, 21 nt, RNAi-sense strand
caacucaggaauccaguacuu

SEQ ID NO: 17418 - RNA, 21 nt, RNAi-antisense strand
guacuggauuccugaguuguu

SEQ ID NO: 17419 - DNA, 21 bp, Homo sapiens
gaatccagtacaggaaacaga

SEQ ID NO: 17420 - RNA, 21 nt, RNAi-sense strand
auccaguacaggaaacagauu

SEQ ID NO: 17421 - RNA, 21 nt, RNAi-antisense strand
ucuguuuccuguacuggauuu

SEQ ID NO: 17422 - DNA, 21 bp, Homo sapiens
gaaacagagcatgcctcgaga

SEQ ID NO: 17423 - RNA, 21 nt, RNAi-sense strand
aacagagcaugccucgagauu

SEQ ID NO: 17424 - RNA, 21 nt, RNAi-antisense strand
ucucgaggcaugcucuguuuu

SEQ ID NO: 17425 - DNA, 21 bp, Homo sapiens
gaggaggtcttcacagctcaa

SEQ ID NO: 17426 - RNA, 21 nt, RNAi-sense strand
ggaggucuucacagcucaauu

SEQ ID NO: 17427 - RNA, 21 nt, RNAi-antisense strand
uugagcugugaagaccuccuu

SEQ ID NO: 17428 - DNA, 21 bp, Homo sapiens
gatctaaccgatgtgaatgcc

SEQ ID NO: 17429 - RNA, 21 nt, RNAi-sense strand
ucuaaccgaugugaaugccuu

SEQ ID NO: 17430 - RNA, 21 nt, RNAi-antisense strand
ggcauucacaucgguuagauu

SEQ ID NO: 17431 - DNA, 21 bp, Homo sapiens
gatgtgaatgccatagacaga

SEQ ID NO: 17432 - RNA, 21 nt, RNAi-sense strand
ugugaaugccauagacagauu

SEQ ID NO: 17433 - RNA, 21 nt, RNAi-antisense strand
ucugucuauggcauucacauu

SEQ ID NO: 17434 - DNA, 21 bp, Homo sapiens
gaatgccatagacagatggtc

SEQ ID NO: 17435 - RNA, 21 nt, RNAi-sense strand
augccauagacagauggucuu

SEQ ID NO: 17436 - RNA, 21 nt, RNAi-antisense strand
gaccaucugucuauggcauuu

SEQ ID NO: 17437 - DNA, 21 bp, Homo sapiens
gacagatggtccaggatcgtg

SEQ ID NO: 17438 - RNA, 21 nt, RNAi-sense strand
cagaugguccaggaucguguu

SEQ ID NO: 17439 - RNA, 21 nt, RNAi-antisense strand
cacgauccuggaccaucuguu

SEQ ID NO: 17440 - DNA, 21 bp, Homo sapiens
gatggtccaggatcgtgtttc

SEQ ID NO: 17441 - RNA, 21 nt, RNAi-sense strand
ugguccaggaucguguuucuu

SEQ ID NO: 17442 - RNA, 21 nt, RNAi-antisense strand
gaaacacgauccuggaccauu

SEQ ID NO: 17443 - DNA, 21 bp, Homo sapiens
gatcgtgtttccattcacttt

SEQ ID NO: 17444 - RNA, 21 nt, RNAi-sense strand
ucguguuuccauucacuuuuu

SEQ ID NO: 17445 - RNA, 21 nt, RNAi-antisense strand
aaagugaauggaaacacgauu

SEQ ID NO: 17446 - DNA, 21 bp, Homo sapiens
gacttcatttaacactgagtg

SEQ ID NO: 17447 - RNA, 21 nt, RNAi-sense strand
cuucauuuaacacugaguguu

SEQ ID NO: 17448 - RNA, 21 nt, RNAi-antisense strand
cacucaguguuaaaugaaguu

SEQ ID NO: 17449 - DNA, 21 bp, Homo sapiens
gagtgaaatattactctgcct

SEQ ID NO: 17450 - RNA, 21 nt, RNAi-sense strand
gugaaauauuacucugccuuu

SEQ ID NO: 17451 - RNA, 21 nt, RNAi-antisense strand
aggcagaguaauauuucacuu

SEQ ID NO: 17452 - DNA, 21 bp, Homo sapiens
gaaatattactctgcctgtca

SEQ ID NO: 17453 - RNA, 21 nt, RNAi-sense strand
aauauuacucugccugucauu

SEQ ID NO: 17454 - RNA, 21 nt, RNAi-antisense strand
ugacaggcagaguaauauuuu

SEQ ID NO: 17455 - DNA, 21 bp, Homo sapiens
gacacacaagcagacacacac

SEQ ID NO: 17456 - RNA, 21 nt, RNAi-sense strand
cacacaagcagacacacacuu

SEQ ID NO: 17457 - RNA, 21 nt, RNAi-antisense strand
gugugugucugcuuguguguu

SEQ ID NO: 17458 - DNA, 21 bp, Homo sapiens
gacacacacatatatacatac

SEQ ID NO: 17459 - RNA, 21 nt, RNAi-sense strand
cacacacauauauacauacuu

SEQ ID NO: 17460 - RNA, 21 nt, RNAi-antisense strand
guauguauauauguguguguu

SEQ ID NO: 17461 - DNA, 21 bp, Homo sapiens
gaggatgtatgtgtatatgtt

SEQ ID NO: 17462 - RNA, 21 nt, RNAi-sense strand
ggauguauguguauauguuuu

SEQ ID NO: 17463 - RNA, 21 nt, RNAi-antisense strand
aacauauacacauacauccuu

SEQ ID NO: 17464 - DNA, 21 bp, Homo sapiens
gacaatttaccacaggatgca

SEQ ID NO: 17465 - RNA, 21 nt, RNAi-sense strand
caauuuaccacaggaugcauu

SEQ ID NO: 17466 - RNA, 21 nt, RNAi-antisense strand
ugcauccugugguaaauuguu

SEQ ID NO: 17467 - DNA, 21 bp, Homo sapiens
gagtcacttacttcatatcct

SEQ ID NO: 17468 - RNA, 21 nt, RNAi-sense strand
gucacuuacuucauauccuuu

SEQ ID NO: 17469 - RNA, 21 nt, RNAi-antisense strand
aggauaugaaguaagugacuu

SEQ ID NO: 17470 - DNA, 21 bp, Homo sapiens
gagccactggcagtgtgctta

SEQ ID NO: 17471 - RNA, 21 nt, RNAi-sense strand
gccacuggcagugugcuuauu

SEQ ID NO: 17472 - RNA, 21 nt, RNAi-antisense strand
uaagcacacugccaguggcuu

SEQ ID NO: 17473 - DNA, 21 bp, Homo sapiens
gatgtctgaacgaccgtcttt

SEQ ID NO: 17474 - RNA, 21 nt, RNAi-sense strand
ugucugaacgaccgucuuuuu

SEQ ID NO: 17475 - RNA, 21 nt, RNAi-antisense strand
aaagacggucguucagacauu

SEQ ID NO: 17476 - DNA, 21 bp, Homo sapiens
gagtgaatggcatctcgttgt

SEQ ID NO: 17477 - RNA, 21 nt, RNAi-sense strand
gugaauggcaucucguuguuu

SEQ ID NO: 17478 - RNA, 21 nt, RNAi-antisense strand
acaacgagaugccauucacuu

SEQ ID NO: 17479 - DNA, 21 bp, Homo sapiens
gaatggcatctcgttgtaagt

SEQ ID NO: 17480 - RNA, 21 nt, RNAi-sense strand
auggcaucucguuguaaguuu

SEQ ID NO: 17481 - RNA, 21 nt, RNAi-antisense strand
acuuacaacgagaugccauuu

SEQ ID NO: 17482 - DNA, 21 bp, Homo sapiens
gagtggatccagcttcactgt

SEQ ID NO: 17483 - RNA, 21 nt, RNAi-sense strand
guggauccagcuucacuguuu

SEQ ID NO: 17484 - RNA, 21 nt, RNAi-antisense strand
acagugaagcuggauccacuu

SEQ ID NO: 17485 - DNA, 21 bp, Homo sapiens
gatccagcttcactgtcatgt

SEQ ID NO: 17486 - RNA, 21 nt, RNAi-sense strand
uccagcuucacugucauguuu

SEQ ID NO: 17487 - RNA, 21 nt, RNAi-antisense strand
acaugacagugaagcuggauu

SEQ ID NO: 17488 - DNA, 21 bp, Homo sapiens
gaacacagtgacacgtttggc

SEQ ID NO: 17489 - RNA, 21 nt, RNAi-sense strand
acacagugacacguuuggcuu

SEQ ID NO: 17490 - RNA, 21 nt, RNAi-antisense strand
gccaaacgugucacuguguuu

SEQ ID NO: 17491 - DNA, 21 bp, Homo sapiens
gacacgtttggccagtgacat

SEQ ID NO: 17492 - RNA, 21 nt, RNAi-sense strand
cacguuuggccagugacauuu

SEQ ID NO: 17493 - RNA, 21 nt, RNAi-antisense strand
augucacuggccaaacguguu

SEQ ID NO: 17494 - DNA, 21 bp, Homo sapiens
gatttctaggcctgatatcca

SEQ ID NO: 17495 - RNA, 21 nt, RNAi-sense strand
uuucuaggccugauauccauu

SEQ ID NO: 17496 - RNA, 21 nt, RNAi-antisense strand
uggauaucaggccuagaaauu

SEQ ID NO: 17497 - DNA, 21 bp, Homo sapiens
gatatccaacagaaagcatag

SEQ ID NO: 17498 - RNA, 21 nt, RNAi-sense strand
uauccaacagaaagcauaguu

SEQ ID NO: 17499 - RNA, 21 nt, RNAi-antisense strand
cuaugcuuucuguuggauauu

SEQ ID NO: 17500 - DNA, 21 bp, Homo sapiens
gaaagcatagacgtctcaggt

SEQ ID NO: 17501 - RNA, 21 nt, RNAi-sense strand
aagcauagacgucucagguuu

SEQ ID NO: 17502 - RNA, 21 nt, RNAi-antisense strand
accugagacgucuaugcuuuu

SEQ ID NO: 17503 - DNA, 21 bp, Homo sapiens
gacgtctcaggttattcgtta

SEQ ID NO: 17504 - RNA, 21 nt, RNAi-sense strand
cgucucagguuauucguuauu

SEQ ID NO: 17505 - RNA, 21 nt, RNAi-antisense strand
uaacgaauaaccugagacguu

SEQ ID NO: 17506 - DNA, 21 bp, Homo sapiens
gaaactaagaatcatcctcat

SEQ ID NO: 17507 - RNA, 21 nt, RNAi-sense strand
aacuaagaaucauccucauuu

SEQ ID NO: 17508 - RNA, 21 nt, RNAi-antisense strand
augaggaugauucuuaguuuu

SEQ ID NO: 17509 - DNA, 21 bp, Homo sapiens
gaatcatcctcatgcctttat

SEQ ID NO: 17510 - RNA, 21 nt, RNAi-sense strand
aucauccucaugccuuuauuu

SEQ ID NO: 17511 - RNA, 21 nt, RNAi-antisense strand
auaaaggcaugaggaugauuu

SEQ ID NO: 17512 - DNA, 21 bp, Homo sapiens
gacatatttcataagcacatc

SEQ ID NO: 17513 - RNA, 21 nt, RNAi-sense strand
cauauuucauaagcacaucuu

SEQ ID NO: 17514 - RNA, 21 nt, RNAi-antisense strand
gaugugcuuaugaaauauguu

SEQ ID NO: 17515 - DNA, 21 bp, Homo sapiens
gactgactaggattctgcagg

SEQ ID NO: 17516 - RNA, 21 nt, RNAi-sense strand
cugacuaggauucugcagguu

SEQ ID NO: 17517 - RNA, 21 nt, RNAi-antisense strand
ccugcagaauccuagucaguu

SEQ ID NO: 17518 - DNA, 21 bp, Homo sapiens
gactaggattctgcaggaaca

SEQ ID NO: 17519 - RNA, 21 nt, RNAi-sense strand
cuaggauucugcaggaacauu

SEQ ID NO: 17520 - RNA, 21 nt, RNAi-antisense strand
uguuccugcagaauccuaguu

SEQ ID NO: 17521 - DNA, 21 bp, Homo sapiens
gaccgttctctgaggcaaagg

SEQ ID NO: 17522 - RNA, 21 nt, RNAi-sense strand
ccguucucugaggcaaagguu

SEQ ID NO: 17523 - RNA, 21 nt, RNAi-antisense strand
ccuuugccucagagaacgguu

SEQ ID NO: 17524 - DNA, 21 bp, Homo sapiens
gacagcaaacacagtcactgt

SEQ ID NO: 17525 - RNA, 21 nt, RNAi-sense strand
cagcaaacacagucacuguuu

SEQ ID NO: 17526 - RNA, 21 nt, RNAi-antisense strand
acagugacuguguuugcuguu

SEQ ID NO: 17527 - DNA, 21 bp, Homo sapiens
gatccacagcctcatcagtat

SEQ ID NO: 17528 - RNA, 21 nt, RNAi-sense strand
uccacagccucaucaguauuu

SEQ ID NO: 17529 - RNA, 21 nt, RNAi-antisense strand
auacugaugaggcuguggauu

SEQ ID NO: 17530 - DNA, 21 bp, Homo sapiens
gaaacaagacaaggtgcaccg

SEQ ID NO: 17531 - RNA, 21 nt, RNAi-sense strand
aacaagacaaggugcaccguu

SEQ ID NO: 17532 - RNA, 21 nt, RNAi-antisense strand
cggugcaccuugucuuguuuu

SEQ ID NO: 17533 - DNA, 21 bp, Homo sapiens
gacaaggtgcaccggtttcat

SEQ ID NO: 17534 - RNA, 21 nt, RNAi-sense strand
caaggugcaccgguuucauuu

SEQ ID NO: 17535 - RNA, 21 nt, RNAi-antisense strand
augaaaccggugcaccuuguu

SEQ ID NO: 17536 - DNA, 21 bp, Homo sapiens
gacgcaaccttaacttactat

SEQ ID NO: 17537 - RNA, 21 nt, RNAi-sense strand
cgcaaccuuaacuuacuauuu

SEQ ID NO: 17538 - RNA, 21 nt, RNAi-antisense strand
auaguaaguuaagguugcguu

SEQ ID NO: 17539 - DNA, 21 bp, Homo sapiens
tatggctacaccacggatgac

SEQ ID NO: 17540 - RNA, 21 nt, RNAi-sense strand
uggcuacaccacggaugacuu

SEQ ID NO: 17541 - RNA, 21 nt, RNAi-antisense strand
gucauccgugguguagccauu

SEQ ID NO: 17542 - DNA, 21 bp, Homo sapiens
tacaccacggatgacattgag

SEQ ID NO: 17543 - RNA, 21 nt, RNAi-sense strand
caccacggaugacauugaguu

SEQ ID NO: 17544 - RNA, 21 nt, RNAi-antisense strand
cucaaugucauccgugguguu

SEQ ID NO: 17545 - DNA, 21 bp, Homo sapiens
taccggagtggaaaggattga

SEQ ID NO: 17546 - RNA, 21 nt, RNAi-sense strand
ccggaguggaaaggauugauu

SEQ ID NO: 17547 - RNA, 21 nt, RNAi-antisense strand
ucaauccuuuccacuccgguu

SEQ ID NO: 17548 - DNA, 21 bp, Homo sapiens
tatcctcgactgtcactgagc

SEQ ID NO: 17549 - RNA, 21 nt, RNAi-sense strand
uccucgacugucacugagcuu

SEQ ID NO: 17550 - RNA, 21 nt, RNAi-antisense strand
gcucagugacagucgaggauu

SEQ ID NO: 17551 - DNA, 21 bp, Homo sapiens
tatactgataacgattctgtc

SEQ ID NO: 17552 - RNA, 21 nt, RNAi-sense strand
uacugauaacgauucugucuu

SEQ ID NO: 17553 - RNA, 21 nt, RNAi-antisense strand
gacagaaucguuaucaguauu

SEQ ID NO: 17554 - DNA, 21 bp, Homo sapiens
tactgataacgattctgtcgt

SEQ ID NO: 17555 - RNA, 21 nt, RNAi-sense strand
cugauaacgauucugucguuu

SEQ ID NO: 17556 - RNA, 21 nt, RNAi-antisense strand
acgacagaaucguuaucaguu

SEQ ID NO: 17557 - DNA, 21 bp, Homo sapiens
tatgatgcatctgctgctaga

SEQ ID NO: 17558 - RNA, 21 nt, RNAi-sense strand
ugaugcaucugcugcuagauu

SEQ ID NO: 17559 - RNA, 21 nt, RNAi-antisense strand
ucuagcagcagaugcaucauu

SEQ ID NO: 17560 - DNA, 21 bp, Homo sapiens
tatgtcaaagccattgacatg

SEQ ID NO: 17561 - RNA, 21 nt, RNAi-sense strand
ugucaaagccauugacauguu

SEQ ID NO: 17562 - RNA, 21 nt, RNAi-antisense strand
caugucaauggcuuugacauu

SEQ ID NO: 17563 - DNA, 21 bp, Homo sapiens
tatgcctttgtcaactacatt

SEQ ID NO: 17564 - RNA, 21 nt, RNAi-sense strand
ugccuuugucaacuacauuuu

SEQ ID NO: 17565 - RNA, 21 nt, RNAi-antisense strand
aauguaguugacaaaggcauu

SEQ ID NO: 17566 - DNA, 21 bp, Homo sapiens
tattctgttgacatcgctgga

SEQ ID NO: 17567 - RNA, 21 nt, RNAi-sense strand
uucuguugacaucgcuggauu

SEQ ID NO: 17568 - RNA, 21 nt, RNAi-antisense strand
uccagcgaugucaacagaauu

SEQ ID NO: 17569 - DNA, 21 bp, Homo sapiens
taccaggaattcagcaatatc

SEQ ID NO: 17570 - RNA, 21 nt, RNAi-sense strand
ccaggaauucagcaauaucuu

SEQ ID NO: 17571 - RNA, 21 nt, RNAi-antisense strand
gauauugcugaauuccugguu

SEQ ID NO: 17572 - DNA, 21 bp, Homo sapiens
tatcctttgacaactcaggaa

SEQ ID NO: 17573 - RNA, 21 nt, RNAi-sense strand
uccuuugacaacucaggaauu

SEQ ID NO: 17574 - RNA, 21 nt, RNAi-antisense strand
uuccugaguugucaaaggauu

SEQ ID NO: 17575 - DNA, 21 bp, Homo sapiens
tacaggaaacagagcatgcct

SEQ ID NO: 17576 - RNA, 21 nt, RNAi-sense strand
caggaaacagagcaugccuuu

SEQ ID NO: 17577 - RNA, 21 nt, RNAi-antisense strand
aggcaugcucuguuuccuguu

SEQ ID NO: 17578 - DNA, 21 bp, Homo sapiens
tacggaggaggtcttcacagc

SEQ ID NO: 17579 - RNA, 21 nt, RNAi-sense strand
cggaggaggucuucacagcuu

SEQ ID NO: 17580 - RNA, 21 nt, RNAi-antisense strand
gcugugaagaccuccuccguu

SEQ ID NO: 17581 - DNA, 21 bp, Homo sapiens
tacctgatctaaccgatgtga

SEQ ID NO: 17582 - RNA, 21 nt, RNAi-sense strand
ccugaucuaaccgaugugauu

SEQ ID NO: 17583 - RNA, 21 nt, RNAi-antisense strand
ucacaucgguuagaucagguu

SEQ ID NO: 17584 - DNA, 21 bp, Homo sapiens
taaccgatgtgaatgccatag

SEQ ID NO: 17585 - RNA, 21 nt, RNAi-sense strand
accgaugugaaugccauaguu

SEQ ID NO: 17586 - RNA, 21 nt, RNAi-antisense strand
cuauggcauucacaucgguuu

SEQ ID NO: 17587 - DNA, 21 bp, Homo sapiens
tagacagatggtccaggatcg

SEQ ID NO: 17588 - RNA, 21 nt, RNAi-sense strand
gacagaugguccaggaucguu

SEQ ID NO: 17589 - RNA, 21 nt, RNAi-antisense strand
cgauccuggaccaucugucuu

SEQ ID NO: 17590 - DNA, 21 bp, Homo sapiens
tagtttactggctgtactatg

SEQ ID NO: 17591 - RNA, 21 nt, RNAi-sense strand
guuuacuggcuguacuauguu

SEQ ID NO: 17592 - RNA, 21 nt, RNAi-antisense strand
cauaguacagccaguaaacuu

SEQ ID NO: 17593 - DNA, 21 bp, Homo sapiens
tactggctgtactatgttaac

SEQ ID NO: 17594 - RNA, 21 nt, RNAi-sense strand
cuggcuguacuauguuaacuu

SEQ ID NO: 17595 - RNA, 21 nt, RNAi-antisense strand
guuaacauaguacagccaguu

SEQ ID NO: 17596 - DNA, 21 bp, Homo sapiens
tactatgttaactgagtgact

SEQ ID NO: 17597 - RNA, 21 nt, RNAi-sense strand
cuauguuaacugagugacuuu

SEQ ID NO: 17598 - RNA, 21 nt, RNAi-antisense strand
agucacucaguuaacauaguu

SEQ ID NO: 17599 - DNA, 21 bp, Homo sapiens
tatgttaactgagtgactgta

SEQ ID NO: 17600 - RNA, 21 nt, RNAi-sense strand
uguuaacugagugacuguauu

SEQ ID NO: 17601 - RNA, 21 nt, RNAi-antisense strand
uacagucacucaguuaacauu

SEQ ID NO: 17602 - DNA, 21 bp, Homo sapiens
taactgagtgactgtacttga

SEQ ID NO: 17603 - RNA, 21 nt, RNAi-sense strand
acugagugacuguacuugauu

SEQ ID NO: 17604 - RNA, 21 nt, RNAi-antisense strand
ucaaguacagucacucaguuu

SEQ ID NO: 17605 - DNA, 21 bp, Homo sapiens
tattactctgcctgtcaagtt

SEQ ID NO: 17606 - RNA, 21 nt, RNAi-sense strand
uuacucugccugucaaguuuu

SEQ ID NO: 17607 - RNA, 21 nt, RNAi-antisense strand
aacuugacaggcagaguaauu

SEQ ID NO: 17608 - DNA, 21 bp, Homo sapiens
tatacctgtacacacacagac

SEQ ID NO: 17609 - RNA, 21 nt, RNAi-sense strand
uaccuguacacacacagacuu

SEQ ID NO: 17610 - RNA, 21 nt, RNAi-antisense strand
gucuguguguguacagguauu

SEQ ID NO: 17611 - DNA, 21 bp, Homo sapiens
tacctgtacacacacagacac

SEQ ID NO: 17612 - RNA, 21 nt, RNAi-sense strand
ccuguacacacacagacacuu

SEQ ID NO: 17613 - RNA, 21 nt, RNAi-antisense strand
gugucuguguguguacagguu

SEQ ID NO: 17614 - DNA, 21 bp, Homo sapiens
tacacacacagacacacaagc

SEQ ID NO: 17615 - RNA, 21 nt, RNAi-sense strand
cacacacagacacacaagcuu

SEQ ID NO: 17616 - RNA, 21 nt, RNAi-antisense strand
gcuugugugucuguguguguu

SEQ ID NO: 17617 - DNA, 21 bp, Homo sapiens
tatatgtgaactttctcagca

SEQ ID NO: 17618 - RNA, 21 nt, RNAi-sense strand
uaugugaacuuucucagcauu

SEQ ID NO: 17619 - RNA, 21 nt, RNAi-antisense strand
ugcugagaaaguucacauauu

SEQ ID NO: 17620 - DNA, 21 bp, Homo sapiens
tatgtgaactttctcagcata

SEQ ID NO: 17621 - RNA, 21 nt, RNAi-sense strand
ugugaacuuucucagcauauu

SEQ ID NO: 17622 - RNA, 21 nt, RNAi-antisense strand
uaugcugagaaaguucacauu

SEQ ID NO: 17623 - DNA, 21 bp, Homo sapiens
tacacgtgtatatgaggatgt

SEQ ID NO: 17624 - RNA, 21 nt, RNAi-sense strand
cacguguauaugaggauguuu

SEQ ID NO: 17625 - RNA, 21 nt, RNAi-antisense strand
acauccucauauacacguguu

SEQ ID NO: 17626 - DNA, 21 bp, Homo sapiens
tatgtttatacacacaggagt

SEQ ID NO: 17627 - RNA, 21 nt, RNAi-sense strand
uguuuauacacacaggaguuu

SEQ ID NO: 17628 - RNA, 21 nt, RNAi-antisense strand
acuccuguguguauaaacauu

SEQ ID NO: 17629 - DNA, 21 bp, Homo sapiens
tatacacacaggagtcagtgc

SEQ ID NO: 17630 - RNA, 21 nt, RNAi-sense strand
uacacacaggagucagugcuu

SEQ ID NO: 17631 - RNA, 21 nt, RNAi-antisense strand
gcacugacuccuguguguauu

SEQ ID NO: 17632 - DNA, 21 bp, Homo sapiens
tatggacaatttaccacagga

SEQ ID NO: 17633 - RNA, 21 nt, RNAi-sense strand
uggacaauuuaccacaggauu

SEQ ID NO: 17634 - RNA, 21 nt, RNAi-antisense strand
uccugugguaaauuguccauu

SEQ ID NO: 17635 - DNA, 21 bp, Homo sapiens
taccacaggatgcatattaaa

SEQ ID NO: 17636 - RNA, 21 nt, RNAi-sense strand
ccacaggaugcauauuaaauu

SEQ ID NO: 17637 - RNA, 21 nt, RNAi-antisense strand
uuuaauaugcauccugugguu

SEQ ID NO: 17638 - DNA, 21 bp, Homo sapiens
tattatgccttgagaatgagg

SEQ ID NO: 17639 - RNA, 21 nt, RNAi-sense strand
uuaugccuugagaaugagguu

SEQ ID NO: 17640 - RNA, 21 nt, RNAi-antisense strand
ccucauucucaaggcauaauu

SEQ ID NO: 17641 - DNA, 21 bp, Homo sapiens
tacagtggtattgctagttta

SEQ ID NO: 17642 - RNA, 21 nt, RNAi-sense strand
cagugguauugcuaguuuauu

SEQ ID NO: 17643 - RNA, 21 nt, RNAi-antisense strand
uaaacuagcaauaccacuguu

SEQ ID NO: 17644 - DNA, 21 bp, Homo sapiens
tacttcatatcctctcgttca

SEQ ID NO: 17645 - RNA, 21 nt, RNAi-sense strand
cuucauauccucucguucauu

SEQ ID NO: 17646 - RNA, 21 nt, RNAi-antisense strand
ugaacgagaggauaugaaguu

SEQ ID NO: 17647 - DNA, 21 bp, Homo sapiens
tatcctctcgttcagtttagt

SEQ ID NO: 17648 - RNA, 21 nt, RNAi-sense strand
uccucucguucaguuuaguuu

SEQ ID NO: 17649 - RNA, 21 nt, RNAi-antisense strand
acuaaacugaacgagaggauu

SEQ ID NO: 17650 - DNA, 21 bp, Homo sapiens
tagtaagcaaaggcttcttgg

SEQ ID NO: 17651 - RNA, 21 nt, RNAi-sense strand
guaagcaaaggcuucuugguu

SEQ ID NO: 17652 - RNA, 21 nt, RNAi-antisense strand
ccaagaagccuuugcuuacuu

SEQ ID NO: 17653 - DNA, 21 bp, Homo sapiens
taagcaaaggcttcttggctt

SEQ ID NO: 17654 - RNA, 21 nt, RNAi-sense strand
agcaaaggcuucuuggcuuuu

SEQ ID NO: 17655 - RNA, 21 nt, RNAi-antisense strand
aagccaagaagccuuugcuuu

SEQ ID NO: 17656 - DNA, 21 bp, Homo sapiens
tacctgttgtctgaaacatag

SEQ ID NO: 17657 - RNA, 21 nt, RNAi-sense strand
ccuguugucugaaacauaguu

SEQ ID NO: 17658 - RNA, 21 nt, RNAi-antisense strand
cuauguuucagacaacagguu

SEQ ID NO: 17659 - DNA, 21 bp, Homo sapiens
tacagtgtgtagtttgtttct

SEQ ID NO: 17660 - RNA, 21 nt, RNAi-sense strand
caguguguaguuuguuucuuu

SEQ ID NO: 17661 - RNA, 21 nt, RNAi-antisense strand
agaaacaaacuacacacuguu

SEQ ID NO: 17662 - DNA, 21 bp, Homo sapiens
tagtttgtttctgttgttcac

SEQ ID NO: 17663 - RNA, 21 nt, RNAi-sense strand
guuuguuucuguuguucacuu

SEQ ID NO: 17664 - RNA, 21 nt, RNAi-antisense strand
gugaacaacagaaacaaacuu

SEQ ID NO: 17665 - DNA, 21 bp, Homo sapiens
tacatctcgtatggatttcta

SEQ ID NO: 17666 - RNA, 21 nt, RNAi-sense strand
caucucguauggauuucuauu

SEQ ID NO: 17667 - RNA, 21 nt, RNAi-antisense strand
uagaaauccauacgagauguu

SEQ ID NO: 17668 - DNA, 21 bp, Homo sapiens
tatggatttctaggcctgata

SEQ ID NO: 17669 - RNA, 21 nt, RNAi-sense strand
uggauuucuaggccugauauu

SEQ ID NO: 17670 - RNA, 21 nt, RNAi-antisense strand
uaucaggccuagaaauccauu

SEQ ID NO: 17671 - DNA, 21 bp, Homo sapiens
taggcctgatatccaacagaa

SEQ ID NO: 17672 - RNA, 21 nt, RNAi-sense strand
ggccugauauccaacagaauu

SEQ ID NO: 17673 - RNA, 21 nt, RNAi-antisense strand
uucuguuggauaucaggccuu

SEQ ID NO: 17674 - DNA, 21 bp, Homo sapiens
tatccaacagaaagcatagac

SEQ ID NO: 17675 - RNA, 21 nt, RNAi-sense strand
uccaacagaaagcauagacuu

SEQ ID NO: 17676 - RNA, 21 nt, RNAi-antisense strand
gucuaugcuuucuguuggauu

SEQ ID NO: 17677 - DNA, 21 bp, Homo sapiens
tagacgtctcaggttattcgt

SEQ ID NO: 17678 - RNA, 21 nt, RNAi-sense strand
gacgucucagguuauucguuu

SEQ ID NO: 17679 - RNA, 21 nt, RNAi-antisense strand
acgaauaaccugagacgucuu

SEQ ID NO: 17680 - DNA, 21 bp, Homo sapiens
tacgcttgctatcatggcagc

SEQ ID NO: 17681 - RNA, 21 nt, RNAi-sense strand
cgcuugcuaucauggcagcuu

SEQ ID NO: 17682 - RNA, 21 nt, RNAi-antisense strand
gcugccaugauagcaagcguu

SEQ ID NO: 17683 - DNA, 21 bp, Homo sapiens
tatcatggcagcatgcgatgt

SEQ ID NO: 17684 - RNA, 21 nt, RNAi-sense strand
ucauggcagcaugcgauguuu

SEQ ID NO: 17685 - RNA, 21 nt, RNAi-antisense strand
acaucgcaugcugccaugauu

SEQ ID NO: 17686 - DNA, 21 bp, Homo sapiens
taagaatcatcctcatgcctt

SEQ ID NO: 17687 - RNA, 21 nt, RNAi-sense strand
agaaucauccucaugccuuuu

SEQ ID NO: 17688 - RNA, 21 nt, RNAi-antisense strand
aaggcaugaggaugauucuuu

SEQ ID NO: 17689 - DNA, 21 bp, Homo sapiens
tatttcataagcacatccaac

SEQ ID NO: 17690 - RNA, 21 nt, RNAi-sense strand
uuucauaagcacauccaacuu

SEQ ID NO: 17691 - RNA, 21 nt, RNAi-antisense strand
guuggaugugcuuaugaaauu

SEQ ID NO: 17692 - DNA, 21 bp, Homo sapiens
taagcacatccaactactcct

SEQ ID NO: 17693 - RNA, 21 nt, RNAi-sense strand
agcacauccaacuacuccuuu

SEQ ID NO: 17694 - RNA, 21 nt, RNAi-antisense strand
aggaguaguuggaugugcuuu

SEQ ID NO: 17695 - DNA, 21 bp, Homo sapiens
tactcctagactgactaggat

SEQ ID NO: 17696 - RNA, 21 nt, RNAi-sense strand
cuccuagacugacuaggauuu

SEQ ID NO: 17697 - RNA, 21 nt, RNAi-antisense strand
auccuagucagucuaggaguu

SEQ ID NO: 17698 - DNA, 21 bp, Homo sapiens
tagactgactaggattctgca

SEQ ID NO: 17699 - RNA, 21 nt, RNAi-sense strand
gacugacuaggauucugcauu

SEQ ID NO: 17700 - RNA, 21 nt, RNAi-antisense strand
ugcagaauccuagucagucuu

SEQ ID NO: 17701 - DNA, 21 bp, Homo sapiens
taggattctgcaggaacatga

SEQ ID NO: 17702 - RNA, 21 nt, RNAi-sense strand
ggauucugcaggaacaugauu

SEQ ID NO: 17703 - RNA, 21 nt, RNAi-antisense strand
ucauguuccugcagaauccuu

SEQ ID NO: 17704 - DNA, 21 bp, Homo sapiens
taaagctcgtagaaacaagac

SEQ ID NO: 17705 - RNA, 21 nt, RNAi-sense strand
aagcucguagaaacaagacuu

SEQ ID NO: 17706 - RNA, 21 nt, RNAi-antisense strand
gucuuguuucuacgagcuuuu

SEQ ID NO: 17707 - DNA, 21 bp, Homo sapiens
tagaaacaagacaaggtgcac

SEQ ID NO: 17708 - RNA, 21 nt, RNAi-sense strand
gaaacaagacaaggugcacuu

SEQ ID NO: 17709 - RNA, 21 nt, RNAi-antisense strand
gugcaccuugucuuguuucuu

SEQ ID NO: 17710 - DNA, 21 bp, Homo sapiens
tagacgcaaccttaacttact

SEQ ID NO: 17711 - RNA, 21 nt, RNAi-sense strand
gacgcaaccuuaacuuacuuu

SEQ ID NO: 17712 - RNA, 21 nt, RNAi-antisense strand
aguaaguuaagguugcgucuu

SEQ ID NO: 17713 - DNA, 21 bp, Homo sapiens
aagctgttgaaaggctacgac

SEQ ID NO: 17714 - RNA, 21 nt, RNAi-sense strand
gcuguugaaaggcuacgacuu

SEQ ID NO: 17715 - RNA, 21 nt, RNAi-antisense strand
gucguagccuuucaacagcuu

SEQ ID NO: 17716 - DNA, 21 bp, Homo sapiens
aaaggctacgacattcgccta

SEQ ID NO: 17717 - RNA, 21 nt, RNAi-sense strand
aggcuacgacauucgccuauu

SEQ ID NO: 17718 - RNA, 21 nt, RNAi-antisense strand
uaggcgaaugucguagccuuu

SEQ ID NO: 17719 - DNA, 21 bp, Homo sapiens
aaggctacgacattcgcctaa

SEQ ID NO: 17720 - RNA, 21 nt, RNAi-sense strand
ggcuacgacauucgccuaauu

SEQ ID NO: 17721 - RNA, 21 nt, RNAi-antisense strand
uuaggcgaaugucguagccuu

SEQ ID NO: 17722 - DNA, 21 bp, Homo sapiens
aacctcacgcttgacaatcga

SEQ ID NO: 17723 - RNA, 21 nt, RNAi-sense strand
ccucacgcuugacaaucgauu

SEQ ID NO: 17724 - RNA, 21 nt, RNAi-antisense strand
ucgauugucaagcgugagguu

SEQ ID NO: 17725 - DNA, 21 bp, Homo sapiens
aaaccgcatgatccgtcttca

SEQ ID NO: 17726 - RNA, 21 nt, RNAi-sense strand
accgcaugauccgucuucauu

SEQ ID NO: 17727 - RNA, 21 nt, RNAi-antisense strand
ugaagacggaucaugcgguuu

SEQ ID NO: 17728 - DNA, 21 bp, Homo sapiens
aatgttgtcttcgccacaggt

SEQ ID NO: 17729 - RNA, 21 nt, RNAi-sense strand
uguugucuucgccacagguuu

SEQ ID NO: 17730 - RNA, 21 nt, RNAi-antisense strand
accuguggcgaagacaacauu

SEQ ID NO: 17731 - DNA, 21 bp, Homo sapiens
aaaggcagaagaagcttgcag

SEQ ID NO: 17732 - RNA, 21 nt, RNAi-sense strand
aggcagaagaagcuugcaguu

SEQ ID NO: 17733 - RNA, 21 nt, RNAi-antisense strand
cugcaagcuucuucugccuuu

SEQ ID NO: 17734 - DNA, 21 bp, Homo sapiens
aaggcagaagaagcttgcaga

SEQ ID NO: 17735 - RNA, 21 nt, RNAi-sense strand
ggcagaagaagcuugcagauu

SEQ ID NO: 17736 - RNA, 21 nt, RNAi-antisense strand
ucugcaagcuucuucugccuu

SEQ ID NO: 17737 - DNA, 21 bp, Homo sapiens
aaggcaaagaatgaccgttca

SEQ ID NO: 17738 - RNA, 21 nt, RNAi-sense strand
ggcaaagaaugaccguucauu

SEQ ID NO: 17739 - RNA, 21 nt, RNAi-antisense strand
ugaacggucauucuuugccuu

SEQ ID NO: 17740 - DNA, 21 bp, Homo sapiens
aaagaatgaccgttcaaagag

SEQ ID NO: 17741 - RNA, 21 nt, RNAi-sense strand
agaaugaccguucaaagaguu

SEQ ID NO: 17742 - RNA, 21 nt, RNAi-antisense strand
cucuuugaacggucauucuuu

SEQ ID NO: 17743 - DNA, 21 bp, Homo sapiens
aagaatgaccgttcaaagagc

SEQ ID NO: 17744 - RNA, 21 nt, RNAi-sense strand
gaaugaccguucaaagagcuu

SEQ ID NO: 17745 - RNA, 21 nt, RNAi-antisense strand
gcucuuugaacggucauucuu

SEQ ID NO: 17746 - DNA, 21 bp, Homo sapiens
aatgaccgttcaaagagcgaa

SEQ ID NO: 17747 - RNA, 21 nt, RNAi-sense strand
ugaccguucaaagagcgaauu

SEQ ID NO: 17748 - RNA, 21 nt, RNAi-antisense strand
uucgcucuuugaacggucauu

SEQ ID NO: 17749 - DNA, 21 bp, Homo sapiens
aaatattctgttgacatcgct

SEQ ID NO: 17750 - RNA, 21 nt, RNAi-sense strand
auauucuguugacaucgcuuu

SEQ ID NO: 17751 - RNA, 21 nt, RNAi-antisense strand
agcgaugucaacagaauauuu

SEQ ID NO: 17752 - DNA, 21 bp, Homo sapiens
aatattctgttgacatcgctg

SEQ ID NO: 17753 - RNA, 21 nt, RNAi-sense strand
uauucuguugacaucgcuguu

SEQ ID NO: 17754 - RNA, 21 nt, RNAi-antisense strand
cagcgaugucaacagaauauu

SEQ ID NO: 17755 - DNA, 21 bp, Homo sapiens
aactcaggaatccagtacagg

SEQ ID NO: 17756 - RNA, 21 nt, RNAi-sense strand
cucaggaauccaguacagguu

SEQ ID NO: 17757 - RNA, 21 nt, RNAi-antisense strand
ccuguacuggauuccugaguu

SEQ ID NO: 17758 - DNA, 21 bp, Homo sapiens
aaacagagcatgcctcgagaa

SEQ ID NO: 17759 - RNA, 21 nt, RNAi-sense strand
acagagcaugccucgagaauu

SEQ ID NO: 17760 - RNA, 21 nt, RNAi-antisense strand
uucucgaggcaugcucuguuu

SEQ ID NO: 17761 - DNA, 21 bp, Homo sapiens
aaatacctgatctaaccgatg

SEQ ID NO: 17762 - RNA, 21 nt, RNAi-sense strand
auaccugaucuaaccgauguu

SEQ ID NO: 17763 - RNA, 21 nt, RNAi-antisense strand
caucgguuagaucagguauuu

SEQ ID NO: 17764 - DNA, 21 bp, Homo sapiens
aatacctgatctaaccgatgt

SEQ ID NO: 17765 - RNA, 21 nt, RNAi-sense strand
uaccugaucuaaccgauguuu

SEQ ID NO: 17766 - RNA, 21 nt, RNAi-antisense strand
acaucgguuagaucagguauu

SEQ ID NO: 17767 - DNA, 21 bp, Homo sapiens
cagcatcgacatggtttccga

SEQ ID NO: 17768 - RNA, 21 nt, RNAi-sense strand
gcaucgacaugguuuccgauu

SEQ ID NO: 17769 - RNA, 21 nt, RNAi-antisense strand
ucggaaaccaugucgaugcuu

SEQ ID NO: 17770 - DNA, 21 bp, Homo sapiens
caacctcacgcttgacaatcg

SEQ ID NO: 17771 - RNA, 21 nt, RNAi-sense strand
accucacgcuugacaaucguu

SEQ ID NO: 17772 - RNA, 21 nt, RNAi-antisense strand
cgauugucaagcgugagguuu

SEQ ID NO: 17773 - DNA, 21 bp, Homo sapiens
cactgagctttcggttgaaga

SEQ ID NO: 17774 - RNA, 21 nt, RNAi-sense strand
cugagcuuucgguugaagauu

SEQ ID NO: 17775 - RNA, 21 nt, RNAi-antisense strand
ucuucaaccgaaagcucaguu

SEQ ID NO: 17776 - DNA, 21 bp, Homo sapiens
caaggcaaagaatgaccgttc

SEQ ID NO: 17777 - RNA, 21 nt, RNAi-sense strand
aggcaaagaaugaccguucuu

SEQ ID NO: 17778 - RNA, 21 nt, RNAi-antisense strand
gaacggucauucuuugccuuu

SEQ ID NO: 17779 - DNA, 21 bp, Homo sapiens
caaagaatgaccgttcaaaga

SEQ ID NO: 17780 - RNA, 21 nt, RNAi-sense strand
aagaaugaccguucaaagauu

SEQ ID NO: 17781 - RNA, 21 nt, RNAi-antisense strand
ucuuugaacggucauucuuuu

SEQ ID NO: 17782 - DNA, 21 bp, Homo sapiens
cattggcgataccaggaattc

SEQ ID NO: 17783 - RNA, 21 nt, RNAi-sense strand
uuggcgauaccaggaauucuu

SEQ ID NO: 17784 - RNA, 21 nt, RNAi-antisense strand
gaauuccugguaucgccaauu

SEQ ID NO: 17785 - DNA, 21 bp, Homo sapiens
caactcaggaatccagtacag

SEQ ID NO: 17786 - RNA, 21 nt, RNAi-sense strand
acucaggaauccaguacaguu

SEQ ID NO: 17787 - RNA, 21 nt, RNAi-antisense strand
cuguacuggauuccugaguuu

SEQ ID NO: 17788 - DNA, 21 bp, Homo sapiens
catctacggaggaggtcttca

SEQ ID NO: 17789 - RNA, 21 nt, RNAi-sense strand
ucuacggaggaggucuucauu

SEQ ID NO: 17790 - RNA, 21 nt, RNAi-antisense strand
ugaagaccuccuccguagauu

SEQ ID NO: 17791 - DNA, 21 bp, Homo sapiens
gaaaggctacgacattcgcct

SEQ ID NO: 17792 - RNA, 21 nt, RNAi-sense strand
aaggcuacgacauucgccuuu

SEQ ID NO: 17793 - RNA, 21 nt, RNAi-antisense strand
aggcgaaugucguagccuuuu

SEQ ID NO: 17794 - DNA, 21 bp, Homo sapiens
gatgaacatcgacatcgccag

SEQ ID NO: 17795 - RNA, 21 nt, RNAi-sense strand
ugaacaucgacaucgccaguu

SEQ ID NO: 17796 - RNA, 21 nt, RNAi-antisense strand
cuggcgaugucgauguucauu

SEQ ID NO: 17797 - DNA, 21 bp, Homo sapiens
gaacatcgacatcgccagcat

SEQ ID NO: 17798 - RNA, 21 nt, RNAi-sense strand
acaucgacaucgccagcauuu

SEQ ID NO: 17799 - RNA, 21 nt, RNAi-antisense strand
augcuggcgaugucgauguuu

SEQ ID NO: 17800 - DNA, 21 bp, Homo sapiens
gaaagctatggctacaccacg

SEQ ID NO: 17801 - RNA, 21 nt, RNAi-sense strand
aagcuauggcuacaccacguu

SEQ ID NO: 17802 - RNA, 21 nt, RNAi-antisense strand
cgugguguagccauagcuuuu

SEQ ID NO: 17803 - DNA, 21 bp, Homo sapiens
gaggaatgttgtcttcgccac

SEQ ID NO: 17804 - RNA, 21 nt, RNAi-sense strand
ggaauguugucuucgccacuu

SEQ ID NO: 17805 - RNA, 21 nt, RNAi-antisense strand
guggcgaagacaacauuccuu

SEQ ID NO: 17806 - DNA, 21 bp, Homo sapiens
gaatgttgtcttcgccacagg

SEQ ID NO: 17807 - RNA, 21 nt, RNAi-sense strand
auguugucuucgccacagguu

SEQ ID NO: 17808 - RNA, 21 nt, RNAi-antisense strand
ccuguggcgaagacaacauuu

SEQ ID NO: 17809 - DNA, 21 bp, Homo sapiens
gaatgaccgttcaaagagcga

SEQ ID NO: 17810 - RNA, 21 nt, RNAi-sense strand
augaccguucaaagagcgauu

SEQ ID NO: 17811 - RNA, 21 nt, RNAi-antisense strand
ucgcucuuugaacggucauuu

SEQ ID NO: 17812 - DNA, 21 bp, Homo sapiens
gaccgttcaaagagcgaaagc

SEQ ID NO: 17813 - RNA, 21 nt, RNAi-sense strand
ccguucaaagagcgaaagcuu

SEQ ID NO: 17814 - RNA, 21 nt, RNAi-antisense strand
gcuuucgcucuuugaacgguu

SEQ ID NO: 17815 - DNA, 21 bp, Homo sapiens
gaaacagagcatgcctcgaga

SEQ ID NO: 17816 - RNA, 21 nt, RNAi-sense strand
aacagagcaugccucgagauu

SEQ ID NO: 17817 - RNA, 21 nt, RNAi-antisense strand
ucucgaggcaugcucuguuuu

SEQ ID NO: 17818 - DNA, 21 bp, Homo sapiens
gatctaaccgatgtgaatgcc

SEQ ID NO: 17819 - RNA, 21 nt, RNAi-sense strand
ucuaaccgaugugaaugccuu

SEQ ID NO: 17820 - RNA, 21 nt, RNAi-antisense strand
ggcauucacaucgguuagauu

SEQ ID NO: 17821 - DNA, 21 bp, Homo sapiens
tacaccacggatgacattgag

SEQ ID NO: 17822 - RNA, 21 nt, RNAi-sense strand
caccacggaugacauugaguu

SEQ ID NO: 17823 - RNA, 21 nt, RNAi-antisense strand
cucaaugucauccgugguguu

SEQ ID NO: 17824 - DNA, 21 bp, Homo sapiens
tatactgataacgattctgtc

SEQ ID NO: 17825 - RNA, 21 nt, RNAi-sense strand
uacugauaacgauucugucuu

SEQ ID NO: 17826 - RNA, 21 nt, RNAi-antisense strand
gacagaaucguuaucaguauu

SEQ ID NO: 17827 - DNA, 21 bp, Homo sapiens
tactgataacgattctgtcgt

SEQ ID NO: 17828 - RNA, 21 nt, RNAi-sense strand
cugauaacgauucugucguuu

SEQ ID NO: 17829 - RNA, 21 nt, RNAi-antisense strand
acgacagaaucguuaucaguu

SEQ ID NO: 17830 - DNA, 21 bp, Homo sapiens
tacctgatctaaccgatgtga

SEQ ID NO: 17831 - RNA, 21 nt, RNAi-sense strand
ccugaucuaaccgaugugauu

SEQ ID NO: 17832 - RNA, 21 nt, RNAi-antisense strand
ucacaucgguuagaucagguu

SEQ ID NO: 17833 - DNA, 21 bp, Homo sapiens
aacatgtcctttgtgaaggag

SEQ ID NO: 17834 - RNA, 21 nt, RNAi-sense strand
cauguccuuugugaaggaguu

SEQ ID NO: 17835 - RNA, 21 nt, RNAi-antisense strand
cuccuucacaaaggacauguu

SEQ ID NO: 17836 - DNA, 21 bp, Homo sapiens
aaggagacggtggacaagctg

SEQ ID NO: 17837 - RNA, 21 nt, RNAi-sense strand
ggagacgguggacaagcuguu

SEQ ID NO: 17838 - RNA, 21 nt, RNAi-antisense strand
cagcuuguccaccgucuccuu

SEQ ID NO: 17839 - DNA, 21 bp, Homo sapiens
aagctgttgaaaggctacgac

SEQ ID NO: 17840 - RNA, 21 nt, RNAi-sense strand
gcuguugaaaggcuacgacuu

SEQ ID NO: 17841 - RNA, 21 nt, RNAi-antisense strand
gucguagccuuucaacagcuu

SEQ ID NO: 17842 - DNA, 21 bp, Homo sapiens
aaaggctacgacattcgccta

SEQ ID NO: 17843 - RNA, 21 nt, RNAi-sense strand
aggcuacgacauucgccuauu

SEQ ID NO: 17844 - RNA, 21 nt, RNAi-antisense strand
uaggcgaaugucguagccuuu

SEQ ID NO: 17845 - DNA, 21 bp, Homo sapiens
aaggctacgacattcgcctaa

SEQ ID NO: 17846 - RNA, 21 nt, RNAi-sense strand
ggcuacgacauucgccuaauu

SEQ ID NO: 17847 - RNA, 21 nt, RNAi-antisense strand
uuaggcgaaugucguagccuu

SEQ ID NO: 17848 - DNA, 21 bp, Homo sapiens
aacatcgacatcgccagcatc

SEQ ID NO: 17849 - RNA, 21 nt, RNAi-sense strand
caucgacaucgccagcaucuu

SEQ ID NO: 17850 - RNA, 21 nt, RNAi-antisense strand
gaugcuggcgaugucgauguu

SEQ ID NO: 17851 - DNA, 21 bp, Homo sapiens
aagtcaacatggattatacct

SEQ ID NO: 17852 - RNA, 21 nt, RNAi-sense strand
gucaacauggauuauaccuuu

SEQ ID NO: 17853 - RNA, 21 nt, RNAi-antisense strand
agguauaauccauguugacuu

SEQ ID NO: 17854 - DNA, 21 bp, Homo sapiens
aacatggattataccttaacc

SEQ ID NO: 17855 - RNA, 21 nt, RNAi-sense strand
cauggauuauaccuuaaccuu

SEQ ID NO: 17856 - RNA, 21 nt, RNAi-antisense strand
gguuaagguauaauccauguu

SEQ ID NO: 17857 - DNA, 21 bp, Homo sapiens
aacctcacgcttgacaatcga

SEQ ID NO: 17858 - RNA, 21 nt, RNAi-sense strand
ccucacgcuugacaaucgauu

SEQ ID NO: 17859 - RNA, 21 nt, RNAi-antisense strand
ucgauugucaagcgugagguu

SEQ ID NO: 17860 - DNA, 21 bp, Homo sapiens
aatcgagtggctgaccagcta

SEQ ID NO: 17861 - RNA, 21 nt, RNAi-sense strand
ucgaguggcugaccagcuauu

SEQ ID NO: 17862 - RNA, 21 nt, RNAi-antisense strand
uagcuggucagccacucgauu

SEQ ID NO: 17863 - DNA, 21 bp, Homo sapiens
aaagtcatttgtgcatggagt

SEQ ID NO: 17864 - RNA, 21 nt, RNAi-sense strand
agucauuugugcauggaguuu

SEQ ID NO: 17865 - RNA, 21 nt, RNAi-antisense strand
acuccaugcacaaaugacuuu

SEQ ID NO: 17866 - DNA, 21 bp, Homo sapiens
aagtcatttgtgcatggagtg

SEQ ID NO: 17867 - RNA, 21 nt, RNAi-sense strand
gucauuugugcauggaguguu

SEQ ID NO: 17868 - RNA, 21 nt, RNAi-antisense strand
cacuccaugcacaaaugacuu

SEQ ID NO: 17869 - DNA, 21 bp, Homo sapiens
aaaccgcatgatccgtcttca

SEQ ID NO: 17870 - RNA, 21 nt, RNAi-sense strand
accgcaugauccgucuucauu

SEQ ID NO: 17871 - RNA, 21 nt, RNAi-antisense strand
ugaagacggaucaugcgguuu

SEQ ID NO: 17872 - DNA, 21 bp, Homo sapiens
aaccgcatgatccgtcttcac

SEQ ID NO: 17873 - RNA, 21 nt, RNAi-sense strand
ccgcaugauccgucuucacuu

SEQ ID NO: 17874 - RNA, 21 nt, RNAi-antisense strand
gugaagacggaucaugcgguu

SEQ ID NO: 17875 - DNA, 21 bp, Homo sapiens
aatcaccacgacagcagcatg

SEQ ID NO: 17876 - RNA, 21 nt, RNAi-sense strand
ucaccacgacagcagcauguu

SEQ ID NO: 17877 - RNA, 21 nt, RNAi-antisense strand
caugcugcugucguggugauu

SEQ ID NO: 17878 - DNA, 21 bp, Homo sapiens
aactgcactctggaaattgaa

SEQ ID NO: 17879 - RNA, 21 nt, RNAi-sense strand
cugcacucuggaaauugaauu

SEQ ID NO: 17880 - RNA, 21 nt, RNAi-antisense strand
uucaauuuccagagugcaguu

SEQ ID NO: 17881 - DNA, 21 bp, Homo sapiens
aaattgaaagctatggctaca

SEQ ID NO: 17882 - RNA, 21 nt, RNAi-sense strand
auugaaagcuauggcuacauu

SEQ ID NO: 17883 - RNA, 21 nt, RNAi-antisense strand
uguagccauagcuuucaauuu

SEQ ID NO: 17884 - DNA, 21 bp, Homo sapiens
aattgaaagctatggctacac

SEQ ID NO: 17885 - RNA, 21 nt, RNAi-sense strand
uugaaagcuauggcuacacuu

SEQ ID NO: 17886 - RNA, 21 nt, RNAi-antisense strand
guguagccauagcuuucaauu

SEQ ID NO: 17887 - DNA, 21 bp, Homo sapiens
aaagctatggctacaccacgg

SEQ ID NO: 17888 - RNA, 21 nt, RNAi-sense strand
agcuauggcuacaccacgguu

SEQ ID NO: 17889 - RNA, 21 nt, RNAi-antisense strand
ccgugguguagccauagcuuu

SEQ ID NO: 17890 - DNA, 21 bp, Homo sapiens
aagctatggctacaccacgga

SEQ ID NO: 17891 - RNA, 21 nt, RNAi-sense strand
gcuauggcuacaccacggauu

SEQ ID NO: 17892 - RNA, 21 nt, RNAi-antisense strand
uccgugguguagccauagcuu

SEQ ID NO: 17893 - DNA, 21 bp, Homo sapiens
aaggctgttaccggagtggaa

SEQ ID NO: 17894 - RNA, 21 nt, RNAi-sense strand
ggcuguuaccggaguggaauu

SEQ ID NO: 17895 - RNA, 21 nt, RNAi-antisense strand
uuccacuccgguaacagccuu

SEQ ID NO: 17896 - DNA, 21 bp, Homo sapiens
aatgttgtcttcgccacaggt

SEQ ID NO: 17897 - RNA, 21 nt, RNAi-sense strand
uguugucuucgccacagguuu

SEQ ID NO: 17898 - RNA, 21 nt, RNAi-antisense strand
accuguggcgaagacaacauu

SEQ ID NO: 17899 - DNA, 21 bp, Homo sapiens
aagaggaacattggatacttc

SEQ ID NO: 17900 - RNA, 21 nt, RNAi-sense strand
gaggaacauuggauacuucuu

SEQ ID NO: 17901 - RNA, 21 nt, RNAi-antisense strand
gaaguauccaauguuccucuu

SEQ ID NO: 17902 - DNA, 21 bp, Homo sapiens
aattatgatgcatctgctgct

SEQ ID NO: 17903 - RNA, 21 nt, RNAi-sense strand
uuaugaugcaucugcugcuuu

SEQ ID NO: 17904 - RNA, 21 nt, RNAi-antisense strand
agcagcagaugcaucauaauu

SEQ ID NO: 17905 - DNA, 21 bp, Homo sapiens
aactgtgctgacaatgacaac

SEQ ID NO: 17906 - RNA, 21 nt, RNAi-sense strand
cugugcugacaaugacaacuu

SEQ ID NO: 17907 - RNA, 21 nt, RNAi-antisense strand
guugucauugucagcacaguu

SEQ ID NO: 17908 - DNA, 21 bp, Homo sapiens
aaagccattgacatgtacctt

SEQ ID NO: 17909 - RNA, 21 nt, RNAi-sense strand
agccauugacauguaccuuuu

SEQ ID NO: 17910 - RNA, 21 nt, RNAi-antisense strand
aagguacaugucaauggcuuu

SEQ ID NO: 17911 - DNA, 21 bp, Homo sapiens
aagccattgacatgtacctta

SEQ ID NO: 17912 - RNA, 21 nt, RNAi-sense strand
gccauugacauguaccuuauu

SEQ ID NO: 17913 - RNA, 21 nt, RNAi-antisense strand
uaagguacaugucaauggcuu

SEQ ID NO: 17914 - DNA, 21 bp, Homo sapiens
aaaggcagaagaagcttgcag

SEQ ID NO: 17915 - RNA, 21 nt, RNAi-sense strand
aggcagaagaagcuugcaguu

SEQ ID NO: 17916 - RNA, 21 nt, RNAi-antisense strand
cugcaagcuucuucugccuuu

SEQ ID NO: 17917 - DNA, 21 bp, Homo sapiens
aaggcagaagaagcttgcaga

SEQ ID NO: 17918 - RNA, 21 nt, RNAi-sense strand
ggcagaagaagcuugcagauu

SEQ ID NO: 17919 - RNA, 21 nt, RNAi-antisense strand
ucugcaagcuucuucugccuu

SEQ ID NO: 17920 - DNA, 21 bp, Homo sapiens
aaagacagccaaggcaaagaa

SEQ ID NO: 17921 - RNA, 21 nt, RNAi-sense strand
agacagccaaggcaaagaauu

SEQ ID NO: 17922 - RNA, 21 nt, RNAi-antisense strand
uucuuugccuuggcugucuuu

SEQ ID NO: 17923 - DNA, 21 bp, Homo sapiens
aagacagccaaggcaaagaat

SEQ ID NO: 17924 - RNA, 21 nt, RNAi-sense strand
gacagccaaggcaaagaauuu

SEQ ID NO: 17925 - RNA, 21 nt, RNAi-antisense strand
auucuuugccuuggcugucuu

SEQ ID NO: 17926 - DNA, 21 bp, Homo sapiens
aaggcaaagaatgaccgttca

SEQ ID NO: 17927 - RNA, 21 nt, RNAi-sense strand
ggcaaagaaugaccguucauu

SEQ ID NO: 17928 - RNA, 21 nt, RNAi-antisense strand
ugaacggucauucuuugccuu

SEQ ID NO: 17929 - DNA, 21 bp, Homo sapiens
aaagaatgaccgttcaaagag

SEQ ID NO: 17930 - RNA, 21 nt, RNAi-sense strand
agaaugaccguucaaagaguu

SEQ ID NO: 17931 - RNA, 21 nt, RNAi-antisense strand
cucuuugaacggucauucuuu

SEQ ID NO: 17932 - DNA, 21 bp, Homo sapiens
aagaatgaccgttcaaagagc

SEQ ID NO: 17933 - RNA, 21 nt, RNAi-sense strand
gaaugaccguucaaagagcuu

SEQ ID NO: 17934 - RNA, 21 nt, RNAi-antisense strand
gcucuuugaacggucauucuu

SEQ ID NO: 17935 - DNA, 21 bp, Homo sapiens
aatgaccgttcaaagagcgaa

SEQ ID NO: 17936 - RNA, 21 nt, RNAi-sense strand
ugaccguucaaagagcgaauu

SEQ ID NO: 17937 - RNA, 21 nt, RNAi-antisense strand
uucgcucuuugaacggucauu

SEQ ID NO: 17938 - DNA, 21 bp, Homo sapiens
aaatattctgttgacatcgct

SEQ ID NO: 17939 - RNA, 21 nt, RNAi-sense strand
auauucuguugacaucgcuuu

SEQ ID NO: 17940 - RNA, 21 nt, RNAi-antisense strand
agcgaugucaacagaauauuu

SEQ ID NO: 17941 - DNA, 21 bp, Homo sapiens
aatattctgttgacatcgctg

SEQ ID NO: 17942 - RNA, 21 nt, RNAi-sense strand
uauucuguugacaucgcuguu

SEQ ID NO: 17943 - RNA, 21 nt, RNAi-antisense strand
cagcgaugucaacagaauauu

SEQ ID NO: 17944 - DNA, 21 bp, Homo sapiens
aatgaaatgaatgaggtctca

SEQ ID NO: 17945 - RNA, 21 nt, RNAi-sense strand
ugaaaugaaugaggucucauu

SEQ ID NO: 17946 - RNA, 21 nt, RNAi-antisense strand
ugagaccucauucauuucauu

SEQ ID NO: 17947 - DNA, 21 bp, Homo sapiens
aaatgaatgaggtctcaggcg

SEQ ID NO: 17948 - RNA, 21 nt, RNAi-sense strand
augaaugaggucucaggcguu

SEQ ID NO: 17949 - RNA, 21 nt, RNAi-antisense strand
cgccugagaccucauucauuu

SEQ ID NO: 17950 - DNA, 21 bp, Homo sapiens
aatgaatgaggtctcaggcgg

SEQ ID NO: 17951 - RNA, 21 nt, RNAi-sense strand
ugaaugaggucucaggcgguu

SEQ ID NO: 17952 - RNA, 21 nt, RNAi-antisense strand
ccgccugagaccucauucauu

SEQ ID NO: 17953 - DNA, 21 bp, Homo sapiens
aatgaggtctcaggcggcatt

SEQ ID NO: 17954 - RNA, 21 nt, RNAi-sense strand
ugaggucucaggcggcauuuu

SEQ ID NO: 17955 - RNA, 21 nt, RNAi-antisense strand
aaugccgccugagaccucauu

SEQ ID NO: 17956 - DNA, 21 bp, Homo sapiens
aattcagcaatatcctttgac

SEQ ID NO: 17957 - RNA, 21 nt, RNAi-sense strand
uucagcaauauccuuugacuu

SEQ ID NO: 17958 - RNA, 21 nt, RNAi-antisense strand
gucaaaggauauugcugaauu

SEQ ID NO: 17959 - DNA, 21 bp, Homo sapiens
aatatcctttgacaactcagg

SEQ ID NO: 17960 - RNA, 21 nt, RNAi-sense strand
uauccuuugacaacucagguu

SEQ ID NO: 17961 - RNA, 21 nt, RNAi-antisense strand
ccugaguugucaaaggauauu

SEQ ID NO: 17962 - DNA, 21 bp, Homo sapiens
aactcaggaatccagtacagg

SEQ ID NO: 17963 - RNA, 21 nt, RNAi-sense strand
cucaggaauccaguacagguu

SEQ ID NO: 17964 - RNA, 21 nt, RNAi-antisense strand
ccuguacuggauuccugaguu

SEQ ID NO: 17965 - DNA, 21 bp, Homo sapiens
aatccagtacaggaaacagag

SEQ ID NO: 17966 - RNA, 21 nt, RNAi-sense strand
uccaguacaggaaacagaguu

SEQ ID NO: 17967 - RNA, 21 nt, RNAi-antisense strand
cucuguuuccuguacuggauu

SEQ ID NO: 17968 - DNA, 21 bp, Homo sapiens
aaacagagcatgcctcgagaa

SEQ ID NO: 17969 - RNA, 21 nt, RNAi-sense strand
acagagcaugccucgagaauu

SEQ ID NO: 17970 - RNA, 21 nt, RNAi-antisense strand
uucucgaggcaugcucuguuu

SEQ ID NO: 17971 - DNA, 21 bp, Homo sapiens
aacagagcatgcctcgagaag

SEQ ID NO: 17972 - RNA, 21 nt, RNAi-sense strand
cagagcaugccucgagaaguu

SEQ ID NO: 17973 - RNA, 21 nt, RNAi-antisense strand
cuucucgaggcaugcucuguu

SEQ ID NO: 17974 - DNA, 21 bp, Homo sapiens
aaatacctgatctaaccgatg

SEQ ID NO: 17975 - RNA, 21 nt, RNAi-sense strand
auaccugaucuaaccgauguu

SEQ ID NO: 17976 - RNA, 21 nt, RNAi-antisense strand
caucgguuagaucagguauuu

SEQ ID NO: 17977 - DNA, 21 bp, Homo sapiens
aatacctgatctaaccgatgt

SEQ ID NO: 17978 - RNA, 21 nt, RNAi-sense strand
uaccugaucuaaccgauguuu

SEQ ID NO: 17979 - RNA, 21 nt, RNAi-antisense strand
acaucgguuagaucagguauu

SEQ ID NO: 17980 - DNA, 21 bp, Homo sapiens
aaccgatgtgaatgccataga

SEQ ID NO: 17981 - RNA, 21 nt, RNAi-sense strand
ccgaugugaaugccauagauu

SEQ ID NO: 17982 - RNA, 21 nt, RNAi-antisense strand
ucuauggcauucacaucgguu

SEQ ID NO: 17983 - DNA, 21 bp, Homo sapiens
aatgccatagacagatggtcc

SEQ ID NO: 17984 - RNA, 21 nt, RNAi-sense strand
ugccauagacagaugguccuu

SEQ ID NO: 17985 - RNA, 21 nt, RNAi-antisense strand
ggaccaucugucuauggcauu

SEQ ID NO: 17986 - DNA, 21 bp, Homo sapiens
aacttagtttactggctgtac

SEQ ID NO: 17987 - RNA, 21 nt, RNAi-sense strand
cuuaguuuacuggcuguacuu

SEQ ID NO: 17988 - RNA, 21 nt, RNAi-antisense strand
guacagccaguaaacuaaguu

SEQ ID NO: 17989 - DNA, 21 bp, Homo sapiens
aactgagtgactgtacttgat

SEQ ID NO: 17990 - RNA, 21 nt, RNAi-sense strand
cugagugacuguacuugauuu

SEQ ID NO: 17991 - RNA, 21 nt, RNAi-antisense strand
aucaaguacagucacucaguu

SEQ ID NO: 17992 - DNA, 21 bp, Homo sapiens
aagacttcatttaacactgag

SEQ ID NO: 17993 - RNA, 21 nt, RNAi-sense strand
gacuucauuuaacacugaguu

SEQ ID NO: 17994 - RNA, 21 nt, RNAi-antisense strand
cucaguguuaaaugaagucuu

SEQ ID NO: 17995 - DNA, 21 bp, Homo sapiens
aaatattactctgcctgtcaa

SEQ ID NO: 17996 - RNA, 21 nt, RNAi-sense strand
auauuacucugccugucaauu

SEQ ID NO: 17997 - RNA, 21 nt, RNAi-antisense strand
uugacaggcagaguaauauuu

SEQ ID NO: 17998 - DNA, 21 bp, Homo sapiens
aatattactctgcctgtcaag

SEQ ID NO: 17999 - RNA, 21 nt, RNAi-sense strand
uauuacucugccugucaaguu

SEQ ID NO: 18000 - RNA, 21 nt, RNAi-antisense strand
cuugacaggcagaguaauauu

SEQ ID NO: 18001 - DNA, 21 bp, Homo sapiens
aagcagacacacacatatata

SEQ ID NO: 18002 - RNA, 21 nt, RNAi-sense strand
gcagacacacacauauauauu

SEQ ID NO: 18003 - RNA, 21 nt, RNAi-antisense strand
uauauaugugugugucugcuu

SEQ ID NO: 18004 - DNA, 21 bp, Homo sapiens
aaatacacgtgtatatgagga

SEQ ID NO: 18005 - RNA, 21 nt, RNAi-sense strand
auacacguguauaugaggauu

SEQ ID NO: 18006 - RNA, 21 nt, RNAi-antisense strand
uccucauauacacguguauuu

SEQ ID NO: 18007 - DNA, 21 bp, Homo sapiens
aatacacgtgtatatgaggat

SEQ ID NO: 18008 - RNA, 21 nt, RNAi-sense strand
uacacguguauaugaggauuu

SEQ ID NO: 18009 - RNA, 21 nt, RNAi-antisense strand
auccucauauacacguguauu

SEQ ID NO: 18010 - DNA, 21 bp, Homo sapiens
aatttaccacaggatgcatat

SEQ ID NO: 18011 - RNA, 21 nt, RNAi-sense strand
uuuaccacaggaugcauauuu

SEQ ID NO: 18012 - RNA, 21 nt, RNAi-antisense strand
auaugcauccugugguaaauu

SEQ ID NO: 18013 - DNA, 21 bp, Homo sapiens
aaactcatacagtggtattgc

SEQ ID NO: 18014 - RNA, 21 nt, RNAi-sense strand
acucauacagugguauugcuu

SEQ ID NO: 18015 - RNA, 21 nt, RNAi-antisense strand
gcaauaccacuguaugaguuu

SEQ ID NO: 18016 - DNA, 21 bp, Homo sapiens
aactcatacagtggtattgct

SEQ ID NO: 18017 - RNA, 21 nt, RNAi-sense strand
cucauacagugguauugcuuu

SEQ ID NO: 18018 - RNA, 21 nt, RNAi-antisense strand
agcaauaccacuguaugaguu

SEQ ID NO: 18019 - DNA, 21 bp, Homo sapiens
aagcaaaggcttcttggcttc

SEQ ID NO: 18020 - RNA, 21 nt, RNAi-sense strand
gcaaaggcuucuuggcuucuu

SEQ ID NO: 18021 - RNA, 21 nt, RNAi-antisense strand
gaagccaagaagccuuugcuu

SEQ ID NO: 18022 - DNA, 21 bp, Homo sapiens
aaaggcttcttggcttctctg

SEQ ID NO: 18023 - RNA, 21 nt, RNAi-sense strand
aggcuucuuggcuucucuguu

SEQ ID NO: 18024 - RNA, 21 nt, RNAi-antisense strand
cagagaagccaagaagccuuu

SEQ ID NO: 18025 - DNA, 21 bp, Homo sapiens
aaggcttcttggcttctctgg

SEQ ID NO: 18026 - RNA, 21 nt, RNAi-sense strand
ggcuucuuggcuucucugguu

SEQ ID NO: 18027 - RNA, 21 nt, RNAi-antisense strand
ccagagaagccaagaagccuu

SEQ ID NO: 18028 - DNA, 21 bp, Homo sapiens
aatggcatctcgttgtaagta

SEQ ID NO: 18029 - RNA, 21 nt, RNAi-sense strand
uggcaucucguuguaaguauu

SEQ ID NO: 18030 - RNA, 21 nt, RNAi-antisense strand
uacuuacaacgagaugccauu

SEQ ID NO: 18031 - DNA, 21 bp, Homo sapiens
aacacagtgacacgtttggcc

SEQ ID NO: 18032 - RNA, 21 nt, RNAi-sense strand
cacagugacacguuuggccuu

SEQ ID NO: 18033 - RNA, 21 nt, RNAi-antisense strand
ggccaaacgugucacuguguu

SEQ ID NO: 18034 - DNA, 21 bp, Homo sapiens
aaatgtgctctacatctcgta

SEQ ID NO: 18035 - RNA, 21 nt, RNAi-sense strand
augugcucuacaucucguauu

SEQ ID NO: 18036 - RNA, 21 nt, RNAi-antisense strand
uacgagauguagagcacauuu

SEQ ID NO: 18037 - DNA, 21 bp, Homo sapiens
aatgtgctctacatctcgtat

SEQ ID NO: 18038 - RNA, 21 nt, RNAi-sense strand
ugugcucuacaucucguauuu

SEQ ID NO: 18039 - RNA, 21 nt, RNAi-antisense strand
auacgagauguagagcacauu

SEQ ID NO: 18040 - DNA, 21 bp, Homo sapiens
aacagaaagcatagacgtctc

SEQ ID NO: 18041 - RNA, 21 nt, RNAi-sense strand
cagaaagcauagacgucucuu

SEQ ID NO: 18042 - RNA, 21 nt, RNAi-antisense strand
gagacgucuaugcuuucuguu

SEQ ID NO: 18043 - DNA, 21 bp, Homo sapiens
aaagcatagacgtctcaggtt

SEQ ID NO: 18044 - RNA, 21 nt, RNAi-sense strand
agcauagacgucucagguuuu

SEQ ID NO: 18045 - RNA, 21 nt, RNAi-antisense strand
aaccugagacgucuaugcuuu

SEQ ID NO: 18046 - DNA, 21 bp, Homo sapiens
aagcatagacgtctcaggtta

SEQ ID NO: 18047 - RNA, 21 nt, RNAi-sense strand
gcauagacgucucagguuauu

SEQ ID NO: 18048 - RNA, 21 nt, RNAi-antisense strand
uaaccugagacgucuaugcuu

SEQ ID NO: 18049 - DNA, 21 bp, Homo sapiens
aaactaagaatcatcctcatg

SEQ ID NO: 18050 - RNA, 21 nt, RNAi-sense strand
acuaagaaucauccucauguu

SEQ ID NO: 18051 - RNA, 21 nt, RNAi-antisense strand
caugaggaugauucuuaguuu

SEQ ID NO: 18052 - DNA, 21 bp, Homo sapiens
aactaagaatcatcctcatgc

SEQ ID NO: 18053 - RNA, 21 nt, RNAi-sense strand
cuaagaaucauccucaugcuu

SEQ ID NO: 18054 - RNA, 21 nt, RNAi-antisense strand
gcaugaggaugauucuuaguu

SEQ ID NO: 18055 - DNA, 21 bp, Homo sapiens
aagaatcatcctcatgccttt

SEQ ID NO: 18056 - RNA, 21 nt, RNAi-sense strand
gaaucauccucaugccuuuuu

SEQ ID NO: 18057 - RNA, 21 nt, RNAi-antisense strand
aaaggcaugaggaugauucuu

SEQ ID NO: 18058 - DNA, 21 bp, Homo sapiens
aatcatcctcatgcctttatt

SEQ ID NO: 18059 - RNA, 21 nt, RNAi-sense strand
ucauccucaugccuuuauuuu

SEQ ID NO: 18060 - RNA, 21 nt, RNAi-antisense strand
aauaaaggcaugaggaugauu

SEQ ID NO: 18061 - DNA, 21 bp, Homo sapiens
aagcacatccaactactccta

SEQ ID NO: 18062 - RNA, 21 nt, RNAi-sense strand
gcacauccaacuacuccuauu

SEQ ID NO: 18063 - RNA, 21 nt, RNAi-antisense strand
uaggaguaguuggaugugcuu

SEQ ID NO: 18064 - DNA, 21 bp, Homo sapiens
aactactcctagactgactag

SEQ ID NO: 18065 - RNA, 21 nt, RNAi-sense strand
cuacuccuagacugacuaguu

SEQ ID NO: 18066 - RNA, 21 nt, RNAi-antisense strand
cuagucagucuaggaguaguu

SEQ ID NO: 18067 - DNA, 21 bp, Homo sapiens
aacctgacagcaaacacagtc

SEQ ID NO: 18068 - RNA, 21 nt, RNAi-sense strand
ccugacagcaaacacagucuu

SEQ ID NO: 18069 - RNA, 21 nt, RNAi-antisense strand
gacuguguuugcugucagguu

SEQ ID NO: 18070 - DNA, 21 bp, Homo sapiens
aaacacagtcactgttggttc

SEQ ID NO: 18071 - RNA, 21 nt, RNAi-sense strand
acacagucacuguugguucuu

SEQ ID NO: 18072 - RNA, 21 nt, RNAi-antisense strand
gaaccaacagugacuguguuu

SEQ ID NO: 18073 - DNA, 21 bp, Homo sapiens
aacacagtcactgttggttcc

SEQ ID NO: 18074 - RNA, 21 nt, RNAi-sense strand
cacagucacuguugguuccuu

SEQ ID NO: 18075 - RNA, 21 nt, RNAi-antisense strand
ggaaccaacagugacuguguu

SEQ ID NO: 18076 - DNA, 21 bp, Homo sapiens
aaagctcgtagaaacaagaca

SEQ ID NO: 18077 - RNA, 21 nt, RNAi-sense strand
agcucguagaaacaagacauu

SEQ ID NO: 18078 - RNA, 21 nt, RNAi-antisense strand
ugucuuguuucuacgagcuuu

SEQ ID NO: 18079 - DNA, 21 bp, Homo sapiens
aagctcgtagaaacaagacaa

SEQ ID NO: 18080 - RNA, 21 nt, RNAi-sense strand
gcucguagaaacaagacaauu

SEQ ID NO: 18081 - RNA, 21 nt, RNAi-antisense strand
uugucuuguuucuacgagcuu

SEQ ID NO: 18082 - DNA, 21 bp, Homo sapiens
aaacaagacaaggtgcaccgg

SEQ ID NO: 18083 - RNA, 21 nt, RNAi-sense strand
acaagacaaggugcaccgguu

SEQ ID NO: 18084 - RNA, 21 nt, RNAi-antisense strand
ccggugcaccuugucuuguuu

SEQ ID NO: 18085 - DNA, 21 bp, Homo sapiens
aacaagacaaggtgcaccggt

SEQ ID NO: 18086 - RNA, 21 nt, RNAi-sense strand
caagacaaggugcaccgguuu

SEQ ID NO: 18087 - RNA, 21 nt, RNAi-antisense strand
accggugcaccuugucuuguu

SEQ ID NO: 18088 - DNA, 21 bp, Homo sapiens
aagacaaggtgcaccggtttc

SEQ ID NO: 18089 - RNA, 21 nt, RNAi-sense strand
gacaaggugcaccgguuucuu

SEQ ID NO: 18090 - RNA, 21 nt, RNAi-antisense strand
gaaaccggugcaccuugucuu

SEQ ID NO: 18091 - DNA, 21 bp, Homo sapiens
aaggtgcaccggtttcataga

SEQ ID NO: 18092 - RNA, 21 nt, RNAi-sense strand
ggugcaccgguuucauagauu

SEQ ID NO: 18093 - RNA, 21 nt, RNAi-antisense strand
ucuaugaaaccggugcaccuu

SEQ ID NO: 18094 - DNA, 21 bp, Homo sapiens
cagcaggttaggccggaggaa

SEQ ID NO: 18095 - RNA, 21 nt, RNAi-sense strand
gcagguuaggccggaggaauu

SEQ ID NO: 18096 - RNA, 21 nt, RNAi-antisense strand
uuccuccggccuaaccugcuu

SEQ ID NO: 18097 - DNA, 21 bp, Homo sapiens
caggttaggccggaggaacag

SEQ ID NO: 18098 - RNA, 21 nt, RNAi-sense strand
gguuaggccggaggaacaguu

SEQ ID NO: 18099 - RNA, 21 nt, RNAi-antisense strand
cuguuccuccggccuaaccuu

SEQ ID NO: 18100 - DNA, 21 bp, Homo sapiens
catgtcctttgtgaaggagac

SEQ ID NO: 18101 - RNA, 21 nt, RNAi-sense strand
uguccuuugugaaggagacuu

SEQ ID NO: 18102 - RNA, 21 nt, RNAi-antisense strand
gucuccuucacaaaggacauu

SEQ ID NO: 18103 - DNA, 21 bp, Homo sapiens
caagctgttgaaaggctacga

SEQ ID NO: 18104 - RNA, 21 nt, RNAi-sense strand
agcuguugaaaggcuacgauu

SEQ ID NO: 18105 - RNA, 21 nt, RNAi-antisense strand
ucguagccuuucaacagcuuu

SEQ ID NO: 18106 - DNA, 21 bp, Homo sapiens
catcgacatcgccagcatcga

SEQ ID NO: 18107 - RNA, 21 nt, RNAi-sense strand
ucgacaucgccagcaucgauu

SEQ ID NO: 18108 - RNA, 21 nt, RNAi-antisense strand
ucgaugcuggcgaugucgauu

SEQ ID NO: 18109 - DNA, 21 bp, Homo sapiens
catcgccagcatcgacatggt

SEQ ID NO: 18110 - RNA, 21 nt, RNAi-sense strand
ucgccagcaucgacaugguuu

SEQ ID NO: 18111 - RNA, 21 nt, RNAi-antisense strand
accaugucgaugcuggcgauu

SEQ ID NO: 18112 - DNA, 21 bp, Homo sapiens
cagcatcgacatggtttccga

SEQ ID NO: 18113 - RNA, 21 nt, RNAi-sense strand
gcaucgacaugguuuccgauu

SEQ ID NO: 18114 - RNA, 21 nt, RNAi-antisense strand
ucggaaaccaugucgaugcuu

SEQ ID NO: 18115 - DNA, 21 bp, Homo sapiens
catcgacatggtttccgaagt

SEQ ID NO: 18116 - RNA, 21 nt, RNAi-sense strand
ucgacaugguuuccgaaguuu

SEQ ID NO: 18117 - RNA, 21 nt, RNAi-antisense strand
acuucggaaaccaugucgauu

SEQ ID NO: 18118 - DNA, 21 bp, Homo sapiens
catggtttccgaagtcaacat

SEQ ID NO: 18119 - RNA, 21 nt, RNAi-sense strand
ugguuuccgaagucaacauuu

SEQ ID NO: 18120 - RNA, 21 nt, RNAi-antisense strand
auguugacuucggaaaccauu

SEQ ID NO: 18121 - DNA, 21 bp, Homo sapiens
caacatggattataccttaac

SEQ ID NO: 18122 - RNA, 21 nt, RNAi-sense strand
acauggauuauaccuuaacuu

SEQ ID NO: 18123 - RNA, 21 nt, RNAi-antisense strand
guuaagguauaauccauguuu

SEQ ID NO: 18124 - DNA, 21 bp, Homo sapiens
catggattataccttaaccat

SEQ ID NO: 18125 - RNA, 21 nt, RNAi-sense strand
uggauuauaccuuaaccauuu

SEQ ID NO: 18126 - RNA, 21 nt, RNAi-antisense strand
augguuaagguauaauccauu

SEQ ID NO: 18127 - DNA, 21 bp, Homo sapiens
caacctcacgcttgacaatcg

SEQ ID NO: 18128 - RNA, 21 nt, RNAi-sense strand
accucacgcuugacaaucguu

SEQ ID NO: 18129 - RNA, 21 nt, RNAi-antisense strand
cgauugucaagcgugagguuu

SEQ ID NO: 18130 - DNA, 21 bp, Homo sapiens
cacgcttgacaatcgagtggc

SEQ ID NO: 18131 - RNA, 21 nt, RNAi-sense strand
cgcuugacaaucgaguggcuu

SEQ ID NO: 18132 - RNA, 21 nt, RNAi-antisense strand
gccacucgauugucaagcguu

SEQ ID NO: 18133 - DNA, 21 bp, Homo sapiens
caatcgagtggctgaccagct

SEQ ID NO: 18134 - RNA, 21 nt, RNAi-sense strand
aucgaguggcugaccagcuuu

SEQ ID NO: 18135 - RNA, 21 nt, RNAi-antisense strand
agcuggucagccacucgauuu

SEQ ID NO: 18136 - DNA, 21 bp, Homo sapiens
catttgtgcatggagtgacag

SEQ ID NO: 18137 - RNA, 21 nt, RNAi-sense strand
uuugugcauggagugacaguu

SEQ ID NO: 18138 - RNA, 21 nt, RNAi-antisense strand
cugucacuccaugcacaaauu

SEQ ID NO: 18139 - DNA, 21 bp, Homo sapiens
cagaatcaccacgacagcagc

SEQ ID NO: 18140 - RNA, 21 nt, RNAi-sense strand
gaaucaccacgacagcagcuu

SEQ ID NO: 18141 - RNA, 21 nt, RNAi-antisense strand
gcugcugucguggugauucuu

SEQ ID NO: 18142 - DNA, 21 bp, Homo sapiens
caccacgacagcagcatgcat

SEQ ID NO: 18143 - RNA, 21 nt, RNAi-sense strand
ccacgacagcagcaugcauuu

SEQ ID NO: 18144 - RNA, 21 nt, RNAi-antisense strand
augcaugcugcugucgugguu

SEQ ID NO: 18145 - DNA, 21 bp, Homo sapiens
cacgacagcagcatgcatgat

SEQ ID NO: 18146 - RNA, 21 nt, RNAi-sense strand
cgacagcagcaugcaugauuu

SEQ ID NO: 18147 - RNA, 21 nt, RNAi-antisense strand
aucaugcaugcugcugucguu

SEQ ID NO: 18148 - DNA, 21 bp, Homo sapiens
cagcagcatgcatgatggacc

SEQ ID NO: 18149 - RNA, 21 nt, RNAi-sense strand
gcagcaugcaugauggaccuu

SEQ ID NO: 18150 - RNA, 21 nt, RNAi-antisense strand
gguccaucaugcaugcugcuu

SEQ ID NO: 18151 - DNA, 21 bp, Homo sapiens
cagcatgcatgatggacctca

SEQ ID NO: 18152 - RNA, 21 nt, RNAi-sense strand
gcaugcaugauggaccucauu

SEQ ID NO: 18153 - RNA, 21 nt, RNAi-antisense strand
ugagguccaucaugcaugcuu

SEQ ID NO: 18154 - DNA, 21 bp, Homo sapiens
catgcatgatggacctcagga

SEQ ID NO: 18155 - RNA, 21 nt, RNAi-sense strand
ugcaugauggaccucaggauu

SEQ ID NO: 18156 - RNA, 21 nt, RNAi-antisense strand
uccugagguccaucaugcauu

SEQ ID NO: 18157 - DNA, 21 bp, Homo sapiens
catgatggacctcaggagata

SEQ ID NO: 18158 - RNA, 21 nt, RNAi-sense strand
ugauggaccucaggagauauu

SEQ ID NO: 18159 - RNA, 21 nt, RNAi-antisense strand
uaucuccugagguccaucauu

SEQ ID NO: 18160 - DNA, 21 bp, Homo sapiens
cagaactgcactctggaaatt

SEQ ID NO: 18161 - RNA, 21 nt, RNAi-sense strand
gaacugcacucuggaaauuuu

SEQ ID NO: 18162 - RNA, 21 nt, RNAi-antisense strand
aauuuccagagugcaguucuu

SEQ ID NO: 18163 - DNA, 21 bp, Homo sapiens
cactctggaaattgaaagcta

SEQ ID NO: 18164 - RNA, 21 nt, RNAi-sense strand
cucuggaaauugaaagcuauu

SEQ ID NO: 18165 - RNA, 21 nt, RNAi-antisense strand
uagcuuucaauuuccagaguu

SEQ ID NO: 18166 - DNA, 21 bp, Homo sapiens
caccacggatgacattgagtt

SEQ ID NO: 18167 - RNA, 21 nt, RNAi-sense strand
ccacggaugacauugaguuuu

SEQ ID NO: 18168 - RNA, 21 nt, RNAi-antisense strand
aacucaaugucauccgugguu

SEQ ID NO: 18169 - DNA, 21 bp, Homo sapiens
caaggctgttaccggagtgga

SEQ ID NO: 18170 - RNA, 21 nt, RNAi-sense strand
aggcuguuaccggaguggauu

SEQ ID NO: 18171 - RNA, 21 nt, RNAi-antisense strand
uccacuccgguaacagccuuu

SEQ ID NO: 18172 - DNA, 21 bp, Homo sapiens
cagttctccatcgtggagcac

SEQ ID NO: 18173 - RNA, 21 nt, RNAi-sense strand
guucuccaucguggagcacuu

SEQ ID NO: 18174 - RNA, 21 nt, RNAi-antisense strand
gugcuccacgauggagaacuu

SEQ ID NO: 18175 - DNA, 21 bp, Homo sapiens
catcgtggagcaccgtctggt

SEQ ID NO: 18176 - RNA, 21 nt, RNAi-sense strand
ucguggagcaccgucugguuu

SEQ ID NO: 18177 - RNA, 21 nt, RNAi-antisense strand
accagacggugcuccacgauu

SEQ ID NO: 18178 - DNA, 21 bp, Homo sapiens
caccgtctggtctcgaggaat

SEQ ID NO: 18179 - RNA, 21 nt, RNAi-sense strand
ccgucuggucucgaggaauuu

SEQ ID NO: 18180 - RNA, 21 nt, RNAi-antisense strand
auuccucgagaccagacgguu

SEQ ID NO: 18181 - DNA, 21 bp, Homo sapiens
cacaggtgcctatcctcgact

SEQ ID NO: 18182 - RNA, 21 nt, RNAi-sense strand
caggugccuauccucgacuuu

SEQ ID NO: 18183 - RNA, 21 nt, RNAi-antisense strand
agucgaggauaggcaccuguu

SEQ ID NO: 18184 - DNA, 21 bp, Homo sapiens
caggtgcctatcctcgactgt

SEQ ID NO: 18185 - RNA, 21 nt, RNAi-sense strand
ggugccuauccucgacuguuu

SEQ ID NO: 18186 - RNA, 21 nt, RNAi-antisense strand
acagucgaggauaggcaccuu

SEQ ID NO: 18187 - DNA, 21 bp, Homo sapiens
cactgagctttcggttgaaga

SEQ ID NO: 18188 - RNA, 21 nt, RNAi-sense strand
cugagcuuucgguugaagauu

SEQ ID NO: 18189 - RNA, 21 nt, RNAi-antisense strand
ucuucaaccgaaagcucaguu

SEQ ID NO: 18190 - DNA, 21 bp, Homo sapiens
cattggatacttcattcttca

SEQ ID NO: 18191 - RNA, 21 nt, RNAi-sense strand
uuggauacuucauucuucauu

SEQ ID NO: 18192 - RNA, 21 nt, RNAi-antisense strand
ugaagaaugaaguauccaauu

SEQ ID NO: 18193 - DNA, 21 bp, Homo sapiens
cattcttcagacttatatgcc

SEQ ID NO: 18194 - RNA, 21 nt, RNAi-sense strand
uucuucagacuuauaugccuu

SEQ ID NO: 18195 - RNA, 21 nt, RNAi-antisense strand
ggcauauaagucugaagaauu

SEQ ID NO: 18196 - DNA, 21 bp, Homo sapiens
caattatgatgcatctgctgc

SEQ ID NO: 18197 - RNA, 21 nt, RNAi-sense strand
auuaugaugcaucugcugcuu

SEQ ID NO: 18198 - RNA, 21 nt, RNAi-antisense strand
gcagcagaugcaucauaauuu

SEQ ID NO: 18199 - DNA, 21 bp, Homo sapiens
cacaactgtgctgacaatgac

SEQ ID NO: 18200 - RNA, 21 nt, RNAi-sense strand
caacugugcugacaaugacuu

SEQ ID NO: 18201 - RNA, 21 nt, RNAi-antisense strand
gucauugucagcacaguuguu

SEQ ID NO: 18202 - DNA, 21 bp, Homo sapiens
caactgtgctgacaatgacaa

SEQ ID NO: 18203 - RNA, 21 nt, RNAi-sense strand
acugugcugacaaugacaauu

SEQ ID NO: 18204 - RNA, 21 nt, RNAi-antisense strand
uugucauugucagcacaguuu

SEQ ID NO: 18205 - DNA, 21 bp, Homo sapiens
caaagccattgacatgtacct

SEQ ID NO: 18206 - RNA, 21 nt, RNAi-sense strand
aagccauugacauguaccuuu

SEQ ID NO: 18207 - RNA, 21 nt, RNAi-antisense strand
agguacaugucaauggcuuuu

SEQ ID NO: 18208 - DNA, 21 bp, Homo sapiens
caaaggcagaagaagcttgca

SEQ ID NO: 18209 - RNA, 21 nt, RNAi-sense strand
aaggcagaagaagcuugcauu

SEQ ID NO: 18210 - RNA, 21 nt, RNAi-antisense strand
ugcaagcuucuucugccuuuu

SEQ ID NO: 18211 - DNA, 21 bp, Homo sapiens
cagccaaggcaaagaatgacc

SEQ ID NO: 18212 - RNA, 21 nt, RNAi-sense strand
gccaaggcaaagaaugaccuu

SEQ ID NO: 18213 - RNA, 21 nt, RNAi-antisense strand
ggucauucuuugccuuggcuu

SEQ ID NO: 18214 - DNA, 21 bp, Homo sapiens
caaggcaaagaatgaccgttc

SEQ ID NO: 18215 - RNA, 21 nt, RNAi-sense strand
aggcaaagaaugaccguucuu

SEQ ID NO: 18216 - RNA, 21 nt, RNAi-antisense strand
gaacggucauucuuugccuuu

SEQ ID NO: 18217 - DNA, 21 bp, Homo sapiens
caaagaatgaccgttcaaaga

SEQ ID NO: 18218 - RNA, 21 nt, RNAi-sense strand
aagaaugaccguucaaagauu

SEQ ID NO: 18219 - RNA, 21 nt, RNAi-antisense strand
ucuuugaacggucauucuuuu

SEQ ID NO: 18220 - DNA, 21 bp, Homo sapiens
catggaaatattctgttgaca

SEQ ID NO: 18221 - RNA, 21 nt, RNAi-sense strand
uggaaauauucuguugacauu

SEQ ID NO: 18222 - RNA, 21 nt, RNAi-antisense strand
ugucaacagaauauuuccauu

SEQ ID NO: 18223 - DNA, 21 bp, Homo sapiens
catcgctggaagttcacaatg

SEQ ID NO: 18224 - RNA, 21 nt, RNAi-sense strand
ucgcuggaaguucacaauguu

SEQ ID NO: 18225 - RNA, 21 nt, RNAi-antisense strand
cauugugaacuuccagcgauu

SEQ ID NO: 18226 - DNA, 21 bp, Homo sapiens
cacaatgaaatgaatgaggtc

SEQ ID NO: 18227 - RNA, 21 nt, RNAi-sense strand
caaugaaaugaaugaggucuu

SEQ ID NO: 18228 - RNA, 21 nt, RNAi-antisense strand
gaccucauucauuucauuguu

SEQ ID NO: 18229 - DNA, 21 bp, Homo sapiens
caatgaaatgaatgaggtctc

SEQ ID NO: 18230 - RNA, 21 nt, RNAi-sense strand
augaaaugaaugaggucucuu

SEQ ID NO: 18231 - RNA, 21 nt, RNAi-antisense strand
gagaccucauucauuucauuu

SEQ ID NO: 18232 - DNA, 21 bp, Homo sapiens
caggcggcattggcgatacca

SEQ ID NO: 18233 - RNA, 21 nt, RNAi-sense strand
ggcggcauuggcgauaccauu

SEQ ID NO: 18234 - RNA, 21 nt, RNAi-antisense strand
ugguaucgccaaugccgccuu

SEQ ID NO: 18235 - DNA, 21 bp, Homo sapiens
cattggcgataccaggaattc

SEQ ID NO: 18236 - RNA, 21 nt, RNAi-sense strand
uuggcgauaccaggaauucuu

SEQ ID NO: 18237 - RNA, 21 nt, RNAi-antisense strand
gaauuccugguaucgccaauu

SEQ ID NO: 18238 - DNA, 21 bp, Homo sapiens
caggaattcagcaatatcctt

SEQ ID NO: 18239 - RNA, 21 nt, RNAi-sense strand
ggaauucagcaauauccuuuu

SEQ ID NO: 18240 - RNA, 21 nt, RNAi-antisense strand
aaggauauugcugaauuccuu

SEQ ID NO: 18241 - DNA, 21 bp, Homo sapiens
cagcaatatcctttgacaact

SEQ ID NO: 18242 - RNA, 21 nt, RNAi-sense strand
gcaauauccuuugacaacuuu

SEQ ID NO: 18243 - RNA, 21 nt, RNAi-antisense strand
aguugucaaaggauauugcuu

SEQ ID NO: 18244 - DNA, 21 bp, Homo sapiens
caatatcctttgacaactcag

SEQ ID NO: 18245 - RNA, 21 nt, RNAi-sense strand
auauccuuugacaacucaguu

SEQ ID NO: 18246 - RNA, 21 nt, RNAi-antisense strand
cugaguugucaaaggauauuu

SEQ ID NO: 18247 - DNA, 21 bp, Homo sapiens
caactcaggaatccagtacag

SEQ ID NO: 18248 - RNA, 21 nt, RNAi-sense strand
acucaggaauccaguacaguu

SEQ ID NO: 18249 - RNA, 21 nt, RNAi-antisense strand
cuguacuggauuccugaguuu

SEQ ID NO: 18250 - DNA, 21 bp, Homo sapiens
caggaatccagtacaggaaac

SEQ ID NO: 18251 - RNA, 21 nt, RNAi-sense strand
ggaauccaguacaggaaacuu

SEQ ID NO: 18252 - RNA, 21 nt, RNAi-antisense strand
guuuccuguacuggauuccuu

SEQ ID NO: 18253 - DNA, 21 bp, Homo sapiens
cagtacaggaaacagagcatg

SEQ ID NO: 18254 - RNA, 21 nt, RNAi-sense strand
guacaggaaacagagcauguu

SEQ ID NO: 18255 - RNA, 21 nt, RNAi-antisense strand
caugcucuguuuccuguacuu

SEQ ID NO: 18256 - DNA, 21 bp, Homo sapiens
caggaaacagagcatgcctcg

SEQ ID NO: 18257 - RNA, 21 nt, RNAi-sense strand
ggaaacagagcaugccucguu

SEQ ID NO: 18258 - RNA, 21 nt, RNAi-antisense strand
cgaggcaugcucuguuuccuu

SEQ ID NO: 18259 - DNA, 21 bp, Homo sapiens
catctacggaggaggtcttca

SEQ ID NO: 18260 - RNA, 21 nt, RNAi-sense strand
ucuacggaggaggucuucauu

SEQ ID NO: 18261 - RNA, 21 nt, RNAi-antisense strand
ugaagaccuccuccguagauu

SEQ ID NO: 18262 - DNA, 21 bp, Homo sapiens
catagacagatggtccaggat

SEQ ID NO: 18263 - RNA, 21 nt, RNAi-sense strand
uagacagaugguccaggauuu

SEQ ID NO: 18264 - RNA, 21 nt, RNAi-antisense strand
auccuggaccaucugucuauu

SEQ ID NO: 18265 - DNA, 21 bp, Homo sapiens
cagatggtccaggatcgtgtt

SEQ ID NO: 18266 - RNA, 21 nt, RNAi-sense strand
gaugguccaggaucguguuuu

SEQ ID NO: 18267 - RNA, 21 nt, RNAi-antisense strand
aacacgauccuggaccaucuu

SEQ ID NO: 18268 - DNA, 21 bp, Homo sapiens
caggatcgtgtttccattcac

SEQ ID NO: 18269 - RNA, 21 nt, RNAi-sense strand
ggaucguguuuccauucacuu

SEQ ID NO: 18270 - RNA, 21 nt, RNAi-antisense strand
gugaauggaaacacgauccuu

SEQ ID NO: 18271 - DNA, 21 bp, Homo sapiens
caacttagtttactggctgta

SEQ ID NO: 18272 - RNA, 21 nt, RNAi-sense strand
acuuaguuuacuggcuguauu

SEQ ID NO: 18273 - RNA, 21 nt, RNAi-antisense strand
uacagccaguaaacuaaguuu

SEQ ID NO: 18274 - DNA, 21 bp, Homo sapiens
caaagacttcatttaacactg

SEQ ID NO: 18275 - RNA, 21 nt, RNAi-sense strand
aagacuucauuuaacacuguu

SEQ ID NO: 18276 - RNA, 21 nt, RNAi-antisense strand
caguguuaaaugaagucuuuu

SEQ ID NO: 18277 - DNA, 21 bp, Homo sapiens
cactgagtgaaatattactct

SEQ ID NO: 18278 - RNA, 21 nt, RNAi-sense strand
cugagugaaauauuacucuuu

SEQ ID NO: 18279 - RNA, 21 nt, RNAi-antisense strand
agaguaauauuucacucaguu

SEQ ID NO: 18280 - DNA, 21 bp, Homo sapiens
cacacacagacacacaagcag

SEQ ID NO: 18281 - RNA, 21 nt, RNAi-sense strand
cacacagacacacaagcaguu

SEQ ID NO: 18282 - RNA, 21 nt, RNAi-antisense strand
cugcuugugugucuguguguu

SEQ ID NO: 18283 - DNA, 21 bp, Homo sapiens
cacacagacacacaagcagac

SEQ ID NO: 18284 - RNA, 21 nt, RNAi-sense strand
cacagacacacaagcagacuu

SEQ ID NO: 18285 - RNA, 21 nt, RNAi-antisense strand
gucugcuugugugucuguguu

SEQ ID NO: 18286 - DNA, 21 bp, Homo sapiens
cacagacacacaagcagacac

SEQ ID NO: 18287 - RNA, 21 nt, RNAi-sense strand
cagacacacaagcagacacuu

SEQ ID NO: 18288 - RNA, 21 nt, RNAi-antisense strand
gugucugcuugugugucuguu

SEQ ID NO: 18289 - DNA, 21 bp, Homo sapiens
cagacacacaagcagacacac

SEQ ID NO: 18290 - RNA, 21 nt, RNAi-sense strand
gacacacaagcagacacacuu

SEQ ID NO: 18291 - RNA, 21 nt, RNAi-antisense strand
gugugucugcuugugugucuu

SEQ ID NO: 18292 - DNA, 21 bp, Homo sapiens
cacacaagcagacacacacat

SEQ ID NO: 18293 - RNA, 21 nt, RNAi-sense strand
cacaagcagacacacacauuu

SEQ ID NO: 18294 - RNA, 21 nt, RNAi-antisense strand
augugugugucugcuuguguu

SEQ ID NO: 18295 - DNA, 21 bp, Homo sapiens
cacaagcagacacacacatat

SEQ ID NO: 18296 - RNA, 21 nt, RNAi-sense strand
caagcagacacacacauauuu

SEQ ID NO: 18297 - RNA, 21 nt, RNAi-antisense strand
auaugugugugucugcuuguu

SEQ ID NO: 18298 - DNA, 21 bp, Homo sapiens
caagcagacacacacatatat

SEQ ID NO: 18299 - RNA, 21 nt, RNAi-sense strand
agcagacacacacauauauuu

SEQ ID NO: 18300 - RNA, 21 nt, RNAi-antisense strand
auauaugugugugucugcuuu

SEQ ID NO: 18301 - DNA, 21 bp, Homo sapiens
cagacacacacatatatacat

SEQ ID NO: 18302 - RNA, 21 nt, RNAi-sense strand
gacacacacauauauacauuu

SEQ ID NO: 18303 - RNA, 21 nt, RNAi-antisense strand
auguauauaugugugugucuu

SEQ ID NO: 18304 - DNA, 21 bp, Homo sapiens
cacacacatatatacatacgc

SEQ ID NO: 18305 - RNA, 21 nt, RNAi-sense strand
cacacauauauacauacgcuu

SEQ ID NO: 18306 - RNA, 21 nt, RNAi-antisense strand
gcguauguauauauguguguu

SEQ ID NO: 18307 - DNA, 21 bp, Homo sapiens
cacacatatatacatacgcaa

SEQ ID NO: 18308 - RNA, 21 nt, RNAi-sense strand
cacauauauacauacgcaauu

SEQ ID NO: 18309 - RNA, 21 nt, RNAi-antisense strand
uugcguauguauauauguguu

SEQ ID NO: 18310 - DNA, 21 bp, Homo sapiens
cacgtgtatatgaggatgtat

SEQ ID NO: 18311 - RNA, 21 nt, RNAi-sense strand
cguguauaugaggauguauuu

SEQ ID NO: 18312 - RNA, 21 nt, RNAi-antisense strand
auacauccucauauacacguu

SEQ ID NO: 18313 - DNA, 21 bp, Homo sapiens
catgtgtatggaagacaaata

SEQ ID NO: 18314 - RNA, 21 nt, RNAi-sense strand
uguguauggaagacaaauauu

SEQ ID NO: 18315 - RNA, 21 nt, RNAi-antisense strand
uauuugucuuccauacacauu

SEQ ID NO: 18316 - DNA, 21 bp, Homo sapiens
cagctatggacaatttaccac

SEQ ID NO: 18317 - RNA, 21 nt, RNAi-sense strand
gcuauggacaauuuaccacuu

SEQ ID NO: 18318 - RNA, 21 nt, RNAi-antisense strand
gugguaaauuguccauagcuu

SEQ ID NO: 18319 - DNA, 21 bp, Homo sapiens
caatttaccacaggatgcata

SEQ ID NO: 18320 - RNA, 21 nt, RNAi-sense strand
auuuaccacaggaugcauauu

SEQ ID NO: 18321 - RNA, 21 nt, RNAi-antisense strand
uaugcauccugugguaaauuu

SEQ ID NO: 18322 - DNA, 21 bp, Homo sapiens
cacaggatgcatattaaagaa

SEQ ID NO: 18323 - RNA, 21 nt, RNAi-sense strand
caggaugcauauuaaagaauu

SEQ ID NO: 18324 - RNA, 21 nt, RNAi-antisense strand
uucuuuaauaugcauccuguu

SEQ ID NO: 18325 - DNA, 21 bp, Homo sapiens
caggatgcatattaaagaaag

SEQ ID NO: 18326 - RNA, 21 nt, RNAi-sense strand
ggaugcauauuaaagaaaguu

SEQ ID NO: 18327 - RNA, 21 nt, RNAi-antisense strand
cuuucuuuaauaugcauccuu

SEQ ID NO: 18328 - DNA, 21 bp, Homo sapiens
catacagtggtattgctagtt

SEQ ID NO: 18329 - RNA, 21 nt, RNAi-sense strand
uacagugguauugcuaguuuu

SEQ ID NO: 18330 - RNA, 21 nt, RNAi-antisense strand
aacuagcaauaccacuguauu

SEQ ID NO: 18331 - DNA, 21 bp, Homo sapiens
cagtggtattgctagtttaaa

SEQ ID NO: 18332 - RNA, 21 nt, RNAi-sense strand
gugguauugcuaguuuaaauu

SEQ ID NO: 18333 - RNA, 21 nt, RNAi-antisense strand
uuuaaacuagcaauaccacuu

SEQ ID NO: 18334 - DNA, 21 bp, Homo sapiens
cacttacttcatatcctctcg

SEQ ID NO: 18335 - RNA, 21 nt, RNAi-sense strand
cuuacuucauauccucucguu

SEQ ID NO: 18336 - RNA, 21 nt, RNAi-antisense strand
cgagaggauaugaaguaaguu

SEQ ID NO: 18337 - DNA, 21 bp, Homo sapiens
catatcctctcgttcagttta

SEQ ID NO: 18338 - RNA, 21 nt, RNAi-sense strand
uauccucucguucaguuuauu

SEQ ID NO: 18339 - RNA, 21 nt, RNAi-antisense strand
uaaacugaacgagaggauauu

SEQ ID NO: 18340 - DNA, 21 bp, Homo sapiens
cagtttagtaagcaaaggctt

SEQ ID NO: 18341 - RNA, 21 nt, RNAi-sense strand
guuuaguaagcaaaggcuuuu

SEQ ID NO: 18342 - RNA, 21 nt, RNAi-antisense strand
aagccuuugcuuacuaaacuu

SEQ ID NO: 18343 - DNA, 21 bp, Homo sapiens
caaaggcttcttggcttctct

SEQ ID NO: 18344 - RNA, 21 nt, RNAi-sense strand
aaggcuucuuggcuucucuuu

SEQ ID NO: 18345 - RNA, 21 nt, RNAi-antisense strand
agagaagccaagaagccuuuu

SEQ ID NO: 18346 - DNA, 21 bp, Homo sapiens
cactggcagtgtgcttacctg

SEQ ID NO: 18347 - RNA, 21 nt, RNAi-sense strand
cuggcagugugcuuaccuguu

SEQ ID NO: 18348 - RNA, 21 nt, RNAi-antisense strand
cagguaagcacacugccaguu

SEQ ID NO: 18349 - DNA, 21 bp, Homo sapiens
cagtgtgcttacctgttgtct

SEQ ID NO: 18350 - RNA, 21 nt, RNAi-sense strand
gugugcuuaccuguugucuuu

SEQ ID NO: 18351 - RNA, 21 nt, RNAi-antisense strand
agacaacagguaagcacacuu

SEQ ID NO: 18352 - DNA, 21 bp, Homo sapiens
cacgttgatgtctgaacgacc

SEQ ID NO: 18353 - RNA, 21 nt, RNAi-sense strand
cguugaugucugaacgaccuu

SEQ ID NO: 18354 - RNA, 21 nt, RNAi-antisense strand
ggucguucagacaucaacguu

SEQ ID NO: 18355 - DNA, 21 bp, Homo sapiens
catctcgttgtaagtactcta

SEQ ID NO: 18356 - RNA, 21 nt, RNAi-sense strand
ucucguuguaaguacucuauu

SEQ ID NO: 18357 - RNA, 21 nt, RNAi-antisense strand
uagaguacuuacaacgagauu

SEQ ID NO: 18358 - DNA, 21 bp, Homo sapiens
cagtgtgtagtttgtttctgt

SEQ ID NO: 18359 - RNA, 21 nt, RNAi-sense strand
guguguaguuuguuucuguuu

SEQ ID NO: 18360 - RNA, 21 nt, RNAi-antisense strand
acagaaacaaacuacacacuu

SEQ ID NO: 18361 - DNA, 21 bp, Homo sapiens
cacttggagtggatccagctt

SEQ ID NO: 18362 - RNA, 21 nt, RNAi-sense strand
cuuggaguggauccagcuuuu

SEQ ID NO: 18363 - RNA, 21 nt, RNAi-antisense strand
aagcuggauccacuccaaguu

SEQ ID NO: 18364 - DNA, 21 bp, Homo sapiens
cagcttcactgtcatgtgcga

SEQ ID NO: 18365 - RNA, 21 nt, RNAi-sense strand
gcuucacugucaugugcgauu

SEQ ID NO: 18366 - RNA, 21 nt, RNAi-antisense strand
ucgcacaugacagugaagcuu

SEQ ID NO: 18367 - DNA, 21 bp, Homo sapiens
cactgtcatgtgcgaacacag

SEQ ID NO: 18368 - RNA, 21 nt, RNAi-sense strand
cugucaugugcgaacacaguu

SEQ ID NO: 18369 - RNA, 21 nt, RNAi-antisense strand
cuguguucgcacaugacaguu

SEQ ID NO: 18370 - DNA, 21 bp, Homo sapiens
catgtgcgaacacagtgacac

SEQ ID NO: 18371 - RNA, 21 nt, RNAi-sense strand
ugugcgaacacagugacacuu

SEQ ID NO: 18372 - RNA, 21 nt, RNAi-antisense strand
gugucacuguguucgcacauu

SEQ ID NO: 18373 - DNA, 21 bp, Homo sapiens
cacagtgacacgtttggccag

SEQ ID NO: 18374 - RNA, 21 nt, RNAi-sense strand
cagugacacguuuggccaguu

SEQ ID NO: 18375 - RNA, 21 nt, RNAi-antisense strand
cuggccaaacgugucacuguu

SEQ ID NO: 18376 - DNA, 21 bp, Homo sapiens
cagtgacacgtttggccagtg

SEQ ID NO: 18377 - RNA, 21 nt, RNAi-sense strand
gugacacguuuggccaguguu

SEQ ID NO: 18378 - RNA, 21 nt, RNAi-antisense strand
cacuggccaaacgugucacuu

SEQ ID NO: 18379 - DNA, 21 bp, Homo sapiens
cacgtttggccagtgacattt

SEQ ID NO: 18380 - RNA, 21 nt, RNAi-sense strand
cguuuggccagugacauuuuu

SEQ ID NO: 18381 - RNA, 21 nt, RNAi-antisense strand
aaaugucacuggccaaacguu

SEQ ID NO: 18382 - DNA, 21 bp, Homo sapiens
cagtgacatttcaatcactga

SEQ ID NO: 18383 - RNA, 21 nt, RNAi-sense strand
gugacauuucaaucacugauu

SEQ ID NO: 18384 - RNA, 21 nt, RNAi-antisense strand
ucagugauugaaaugucacuu

SEQ ID NO: 18385 - DNA, 21 bp, Homo sapiens
catctcgtatggatttctagg

SEQ ID NO: 18386 - RNA, 21 nt, RNAi-sense strand
ucucguauggauuucuagguu

SEQ ID NO: 18387 - RNA, 21 nt, RNAi-antisense strand
ccuagaaauccauacgagauu

SEQ ID NO: 18388 - DNA, 21 bp, Homo sapiens
caacagaaagcatagacgtct

SEQ ID NO: 18389 - RNA, 21 nt, RNAi-sense strand
acagaaagcauagacgucuuu

SEQ ID NO: 18390 - RNA, 21 nt, RNAi-antisense strand
agacgucuaugcuuucuguuu

SEQ ID NO: 18391 - DNA, 21 bp, Homo sapiens
cagaaagcatagacgtctcag

SEQ ID NO: 18392 - RNA, 21 nt, RNAi-sense strand
gaaagcauagacgucucaguu

SEQ ID NO: 18393 - RNA, 21 nt, RNAi-antisense strand
cugagacgucuaugcuuucuu

SEQ ID NO: 18394 - DNA, 21 bp, Homo sapiens
catagacgtctcaggttattc

SEQ ID NO: 18395 - RNA, 21 nt, RNAi-sense strand
uagacgucucagguuauucuu

SEQ ID NO: 18396 - RNA, 21 nt, RNAi-antisense strand
gaauaaccugagacgucuauu

SEQ ID NO: 18397 - DNA, 21 bp, Homo sapiens
caggttattcgttactctaag

SEQ ID NO: 18398 - RNA, 21 nt, RNAi-sense strand
gguuauucguuacucuaaguu

SEQ ID NO: 18399 - RNA, 21 nt, RNAi-antisense strand
cuuagaguaacgaauaaccuu

SEQ ID NO: 18400 - DNA, 21 bp, Homo sapiens
catggcagcatgcgatgtcat

SEQ ID NO: 18401 - RNA, 21 nt, RNAi-sense strand
uggcagcaugcgaugucauuu

SEQ ID NO: 18402 - RNA, 21 nt, RNAi-antisense strand
augacaucgcaugcugccauu

SEQ ID NO: 18403 - DNA, 21 bp, Homo sapiens
cacttctactgttcaatttca

SEQ ID NO: 18404 - RNA, 21 nt, RNAi-sense strand
cuucuacuguucaauuucauu

SEQ ID NO: 18405 - RNA, 21 nt, RNAi-antisense strand
ugaaauugaacaguagaaguu

SEQ ID NO: 18406 - DNA, 21 bp, Homo sapiens
cagaaactaagaatcatcctc

SEQ ID NO: 18407 - RNA, 21 nt, RNAi-sense strand
gaaacuaagaaucauccucuu

SEQ ID NO: 18408 - RNA, 21 nt, RNAi-antisense strand
gaggaugauucuuaguuucuu

SEQ ID NO: 18409 - DNA, 21 bp, Homo sapiens
catcctcatgcctttatttct

SEQ ID NO: 18410 - RNA, 21 nt, RNAi-sense strand
uccucaugccuuuauuucuuu

SEQ ID NO: 18411 - RNA, 21 nt, RNAi-antisense strand
agaaauaaaggcaugaggauu

SEQ ID NO: 18412 - DNA, 21 bp, Homo sapiens
catgcctttatttctgtatct

SEQ ID NO: 18413 - RNA, 21 nt, RNAi-sense strand
ugccuuuauuucuguaucuuu

SEQ ID NO: 18414 - RNA, 21 nt, RNAi-antisense strand
agauacagaaauaaaggcauu

SEQ ID NO: 18415 - DNA, 21 bp, Homo sapiens
catatttcataagcacatcca

SEQ ID NO: 18416 - RNA, 21 nt, RNAi-sense strand
uauuucauaagcacauccauu

SEQ ID NO: 18417 - RNA, 21 nt, RNAi-antisense strand
uggaugugcuuaugaaauauu

SEQ ID NO: 18418 - DNA, 21 bp, Homo sapiens
cataagcacatccaactactc

SEQ ID NO: 18419 - RNA, 21 nt, RNAi-sense strand
uaagcacauccaacuacucuu

SEQ ID NO: 18420 - RNA, 21 nt, RNAi-antisense strand
gaguaguuggaugugcuuauu

SEQ ID NO: 18421 - DNA, 21 bp, Homo sapiens
cacatccaactactcctagac

SEQ ID NO: 18422 - RNA, 21 nt, RNAi-sense strand
cauccaacuacuccuagacuu

SEQ ID NO: 18423 - RNA, 21 nt, RNAi-antisense strand
gucuaggaguaguuggauguu

SEQ ID NO: 18424 - DNA, 21 bp, Homo sapiens
catccaactactcctagactg

SEQ ID NO: 18425 - RNA, 21 nt, RNAi-sense strand
uccaacuacuccuagacuguu

SEQ ID NO: 18426 - RNA, 21 nt, RNAi-antisense strand
cagucuaggaguaguuggauu

SEQ ID NO: 18427 - DNA, 21 bp, Homo sapiens
caactactcctagactgacta

SEQ ID NO: 18428 - RNA, 21 nt, RNAi-sense strand
acuacuccuagacugacuauu

SEQ ID NO: 18429 - RNA, 21 nt, RNAi-antisense strand
uagucagucuaggaguaguuu

SEQ ID NO: 18430 - DNA, 21 bp, Homo sapiens
catgaccgttctctgaggcaa

SEQ ID NO: 18431 - RNA, 21 nt, RNAi-sense strand
ugaccguucucugaggcaauu

SEQ ID NO: 18432 - RNA, 21 nt, RNAi-antisense strand
uugccucagagaacggucauu

SEQ ID NO: 18433 - DNA, 21 bp, Homo sapiens
caacctgacagcaaacacagt

SEQ ID NO: 18434 - RNA, 21 nt, RNAi-sense strand
accugacagcaaacacaguuu

SEQ ID NO: 18435 - RNA, 21 nt, RNAi-antisense strand
acuguguuugcugucagguuu

SEQ ID NO: 18436 - DNA, 21 bp, Homo sapiens
cagcaaacacagtcactgttg

SEQ ID NO: 18437 - RNA, 21 nt, RNAi-sense strand
gcaaacacagucacuguuguu

SEQ ID NO: 18438 - RNA, 21 nt, RNAi-antisense strand
caacagugacuguguuugcuu

SEQ ID NO: 18439 - DNA, 21 bp, Homo sapiens
caaacacagtcactgttggtt

SEQ ID NO: 18440 - RNA, 21 nt, RNAi-sense strand
aacacagucacuguugguuuu

SEQ ID NO: 18441 - RNA, 21 nt, RNAi-antisense strand
aaccaacagugacuguguuuu

SEQ ID NO: 18442 - DNA, 21 bp, Homo sapiens
cacagtcactgttggttcctt

SEQ ID NO: 18443 - RNA, 21 nt, RNAi-sense strand
cagucacuguugguuccuuuu

SEQ ID NO: 18444 - RNA, 21 nt, RNAi-antisense strand
aaggaaccaacagugacuguu

SEQ ID NO: 18445 - DNA, 21 bp, Homo sapiens
cagtcactgttggttccttct

SEQ ID NO: 18446 - RNA, 21 nt, RNAi-sense strand
gucacuguugguuccuucuuu

SEQ ID NO: 18447 - RNA, 21 nt, RNAi-antisense strand
agaaggaaccaacagugacuu

SEQ ID NO: 18448 - DNA, 21 bp, Homo sapiens
cactgttggttccttctgatc

SEQ ID NO: 18449 - RNA, 21 nt, RNAi-sense strand
cuguugguuccuucugaucuu

SEQ ID NO: 18450 - RNA, 21 nt, RNAi-antisense strand
gaucagaaggaaccaacaguu

SEQ ID NO: 18451 - DNA, 21 bp, Homo sapiens
cacagcctcatcagtatttgg

SEQ ID NO: 18452 - RNA, 21 nt, RNAi-sense strand
cagccucaucaguauuugguu

SEQ ID NO: 18453 - RNA, 21 nt, RNAi-antisense strand
ccaaauacugaugaggcuguu

SEQ ID NO: 18454 - DNA, 21 bp, Homo sapiens
cagcctcatcagtatttggac

SEQ ID NO: 18455 - RNA, 21 nt, RNAi-sense strand
gccucaucaguauuuggacuu

SEQ ID NO: 18456 - RNA, 21 nt, RNAi-antisense strand
guccaaauacugaugaggcuu

SEQ ID NO: 18457 - DNA, 21 bp, Homo sapiens
caagacaaggtgcaccggttt

SEQ ID NO: 18458 - RNA, 21 nt, RNAi-sense strand
agacaaggugcaccgguuuuu

SEQ ID NO: 18459 - RNA, 21 nt, RNAi-antisense strand
aaaccggugcaccuugucuuu

SEQ ID NO: 18460 - DNA, 21 bp, Homo sapiens
caaggtgcaccggtttcatag

SEQ ID NO: 18461 - RNA, 21 nt, RNAi-sense strand
aggugcaccgguuucauaguu

SEQ ID NO: 18462 - RNA, 21 nt, RNAi-antisense strand
cuaugaaaccggugcaccuuu

SEQ ID NO: 18463 - DNA, 21 bp, Homo sapiens
caccggtttcatagacgcaac

SEQ ID NO: 18464 - RNA, 21 nt, RNAi-sense strand
ccgguuucauagacgcaacuu

SEQ ID NO: 18465 - RNA, 21 nt, RNAi-antisense strand
guugcgucuaugaaaccgguu

SEQ ID NO: 18466 - DNA, 21 bp, Homo sapiens
catagacgcaaccttaactta

SEQ ID NO: 18467 - RNA, 21 nt, RNAi-sense strand
uagacgcaaccuuaacuuauu

SEQ ID NO: 18468 - RNA, 21 nt, RNAi-antisense strand
uaaguuaagguugcgucuauu

SEQ ID NO: 18469 - DNA, 21 bp, Homo sapiens
gaggaacagcgccatgtgctc

SEQ ID NO: 18470 - RNA, 21 nt, RNAi-sense strand
ggaacagcgccaugugcucuu

SEQ ID NO: 18471 - RNA, 21 nt, RNAi-antisense strand
gagcacauggcgcuguuccuu

SEQ ID NO: 18472 - DNA, 21 bp, Homo sapiens
gaacatgtcctttgtgaagga

SEQ ID NO: 18473 - RNA, 21 nt, RNAi-sense strand
acauguccuuugugaaggauu

SEQ ID NO: 18474 - RNA, 21 nt, RNAi-antisense strand
uccuucacaaaggacauguuu

SEQ ID NO: 18475 - DNA, 21 bp, Homo sapiens
gaaggagacggtggacaagct

SEQ ID NO: 18476 - RNA, 21 nt, RNAi-sense strand
aggagacgguggacaagcuuu

SEQ ID NO: 18477 - RNA, 21 nt, RNAi-antisense strand
agcuuguccaccgucuccuuu

SEQ ID NO: 18478 - DNA, 21 bp, Homo sapiens
gagacggtggacaagctgttg

SEQ ID NO: 18479 - RNA, 21 nt, RNAi-sense strand
gacgguggacaagcuguuguu

SEQ ID NO: 18480 - RNA, 21 nt, RNAi-antisense strand
caacagcuuguccaccgucuu

SEQ ID NO: 18481 - DNA, 21 bp, Homo sapiens
gacggtggacaagctgttgaa

SEQ ID NO: 18482 - RNA, 21 nt, RNAi-sense strand
cgguggacaagcuguugaauu

SEQ ID NO: 18483 - RNA, 21 nt, RNAi-antisense strand
uucaacagcuuguccaccguu

SEQ ID NO: 18484 - DNA, 21 bp, Homo sapiens
gacaagctgttgaaaggctac

SEQ ID NO: 18485 - RNA, 21 nt, RNAi-sense strand
caagcuguugaaaggcuacuu

SEQ ID NO: 18486 - RNA, 21 nt, RNAi-antisense strand
guagccuuucaacagcuuguu

SEQ ID NO: 18487 - DNA, 21 bp, Homo sapiens
gaaaggctacgacattcgcct

SEQ ID NO: 18488 - RNA, 21 nt, RNAi-sense strand
aaggcuacgacauucgccuuu

SEQ ID NO: 18489 - RNA, 21 nt, RNAi-antisense strand
aggcgaaugucguagccuuuu

SEQ ID NO: 18490 - DNA, 21 bp, Homo sapiens
gatgaacatcgacatcgccag

SEQ ID NO: 18491 - RNA, 21 nt, RNAi-sense strand
ugaacaucgacaucgccaguu

SEQ ID NO: 18492 - RNA, 21 nt, RNAi-antisense strand
cuggcgaugucgauguucauu

SEQ ID NO: 18493 - DNA, 21 bp, Homo sapiens
gaacatcgacatcgccagcat

SEQ ID NO: 18494 - RNA, 21 nt, RNAi-sense strand
acaucgacaucgccagcauuu

SEQ ID NO: 18495 - RNA, 21 nt, RNAi-antisense strand
augcuggcgaugucgauguuu

SEQ ID NO: 18496 - DNA, 21 bp, Homo sapiens
gacatcgccagcatcgacatg

SEQ ID NO: 18497 - RNA, 21 nt, RNAi-sense strand
caucgccagcaucgacauguu

SEQ ID NO: 18498 - RNA, 21 nt, RNAi-antisense strand
caugucgaugcuggcgauguu

SEQ ID NO: 18499 - DNA, 21 bp, Homo sapiens
gacatggtttccgaagtcaac

SEQ ID NO: 18500 - RNA, 21 nt, RNAi-sense strand
caugguuuccgaagucaacuu

SEQ ID NO: 18501 - RNA, 21 nt, RNAi-antisense strand
guugacuucggaaaccauguu

SEQ ID NO: 18502 - DNA, 21 bp, Homo sapiens
gaagtcaacatggattatacc

SEQ ID NO: 18503 - RNA, 21 nt, RNAi-sense strand
agucaacauggauuauaccuu

SEQ ID NO: 18504 - RNA, 21 nt, RNAi-antisense strand
gguauaauccauguugacuuu

SEQ ID NO: 18505 - DNA, 21 bp, Homo sapiens
gacaatcgagtggctgaccag

SEQ ID NO: 18506 - RNA, 21 nt, RNAi-sense strand
caaucgaguggcugaccaguu

SEQ ID NO: 18507 - RNA, 21 nt, RNAi-antisense strand
cuggucagccacucgauuguu

SEQ ID NO: 18508 - DNA, 21 bp, Homo sapiens
gaatcaccacgacagcagcat

SEQ ID NO: 18509 - RNA, 21 nt, RNAi-sense strand
aucaccacgacagcagcauuu

SEQ ID NO: 18510 - RNA, 21 nt, RNAi-antisense strand
augcugcugucguggugauuu

SEQ ID NO: 18511 - DNA, 21 bp, Homo sapiens
gacagcagcatgcatgatgga

SEQ ID NO: 18512 - RNA, 21 nt, RNAi-sense strand
cagcagcaugcaugauggauu

SEQ ID NO: 18513 - RNA, 21 nt, RNAi-antisense strand
uccaucaugcaugcugcuguu

SEQ ID NO: 18514 - DNA, 21 bp, Homo sapiens
gacgagcagaactgcactctg

SEQ ID NO: 18515 - RNA, 21 nt, RNAi-sense strand
cgagcagaacugcacucuguu

SEQ ID NO: 18516 - RNA, 21 nt, RNAi-antisense strand
cagagugcaguucugcucguu

SEQ ID NO: 18517 - DNA, 21 bp, Homo sapiens
gagcagaactgcactctggaa

SEQ ID NO: 18518 - RNA, 21 nt, RNAi-sense strand
gcagaacugcacucuggaauu

SEQ ID NO: 18519 - RNA, 21 nt, RNAi-antisense strand
uuccagagugcaguucugcuu

SEQ ID NO: 18520 - DNA, 21 bp, Homo sapiens
gaactgcactctggaaattga

SEQ ID NO: 18521 - RNA, 21 nt, RNAi-sense strand
acugcacucuggaaauugauu

SEQ ID NO: 18522 - RNA, 21 nt, RNAi-antisense strand
ucaauuuccagagugcaguuu

SEQ ID NO: 18523 - DNA, 21 bp, Homo sapiens
gaaattgaaagctatggctac

SEQ ID NO: 18524 - RNA, 21 nt, RNAi-sense strand
aauugaaagcuauggcuacuu

SEQ ID NO: 18525 - RNA, 21 nt, RNAi-antisense strand
guagccauagcuuucaauuuu

SEQ ID NO: 18526 - DNA, 21 bp, Homo sapiens
gaaagctatggctacaccacg

SEQ ID NO: 18527 - RNA, 21 nt, RNAi-sense strand
aagcuauggcuacaccacguu

SEQ ID NO: 18528 - RNA, 21 nt, RNAi-antisense strand
cgugguguagccauagcuuuu

SEQ ID NO: 18529 - DNA, 21 bp, Homo sapiens
gacaaggctgttaccggagtg

SEQ ID NO: 18530 - RNA, 21 nt, RNAi-sense strand
caaggcuguuaccggaguguu

SEQ ID NO: 18531 - RNA, 21 nt, RNAi-antisense strand
cacuccgguaacagccuuguu

SEQ ID NO: 18532 - DNA, 21 bp, Homo sapiens
gagtggaaaggattgagctcc

SEQ ID NO: 18533 - RNA, 21 nt, RNAi-sense strand
guggaaaggauugagcuccuu

SEQ ID NO: 18534 - RNA, 21 nt, RNAi-antisense strand
ggagcucaauccuuuccacuu

SEQ ID NO: 18535 - DNA, 21 bp, Homo sapiens
gaggaatgttgtcttcgccac

SEQ ID NO: 18536 - RNA, 21 nt, RNAi-sense strand
ggaauguugucuucgccacuu

SEQ ID NO: 18537 - RNA, 21 nt, RNAi-antisense strand
guggcgaagacaacauuccuu

SEQ ID NO: 18538 - DNA, 21 bp, Homo sapiens
gaatgttgtcttcgccacagg

SEQ ID NO: 18539 - RNA, 21 nt, RNAi-sense strand
auguugucuucgccacagguu

SEQ ID NO: 18540 - RNA, 21 nt, RNAi-antisense strand
ccuguggcgaagacaacauuu

SEQ ID NO: 18541 - DNA, 21 bp, Homo sapiens
gactgtcactgagctttcggt

SEQ ID NO: 18542 - RNA, 21 nt, RNAi-sense strand
cugucacugagcuuucgguuu

SEQ ID NO: 18543 - RNA, 21 nt, RNAi-antisense strand
accgaaagcucagugacaguu

SEQ ID NO: 18544 - DNA, 21 bp, Homo sapiens
gagctttcggttgaagaggaa

SEQ ID NO: 18545 - RNA, 21 nt, RNAi-sense strand
gcuuucgguugaagaggaauu

SEQ ID NO: 18546 - RNA, 21 nt, RNAi-antisense strand
uuccucuucaaccgaaagcuu

SEQ ID NO: 18547 - DNA, 21 bp, Homo sapiens
gaagaggaacattggatactt

SEQ ID NO: 18548 - RNA, 21 nt, RNAi-sense strand
agaggaacauuggauacuuuu

SEQ ID NO: 18549 - RNA, 21 nt, RNAi-antisense strand
aaguauccaauguuccucuuu

SEQ ID NO: 18550 - DNA, 21 bp, Homo sapiens
gaggaacattggatacttcat

SEQ ID NO: 18551 - RNA, 21 nt, RNAi-sense strand
ggaacauuggauacuucauuu

SEQ ID NO: 18552 - RNA, 21 nt, RNAi-antisense strand
augaaguauccaauguuccuu

SEQ ID NO: 18553 - DNA, 21 bp, Homo sapiens
gaacattggatacttcattct

SEQ ID NO: 18554 - RNA, 21 nt, RNAi-sense strand
acauuggauacuucauucuuu

SEQ ID NO: 18555 - RNA, 21 nt, RNAi-antisense strand
agaaugaaguauccaauguuu

SEQ ID NO: 18556 - DNA, 21 bp, Homo sapiens
gatacttcattcttcagactt

SEQ ID NO: 18557 - RNA, 21 nt, RNAi-sense strand
uacuucauucuucagacuuuu

SEQ ID NO: 18558 - RNA, 21 nt, RNAi-antisense strand
aagucugaagaaugaaguauu

SEQ ID NO: 18559 - DNA, 21 bp, Homo sapiens
gatcaattatgatgcatctgc

SEQ ID NO: 18560 - RNA, 21 nt, RNAi-sense strand
ucaauuaugaugcaucugcuu

SEQ ID NO: 18561 - RNA, 21 nt, RNAi-antisense strand
gcagaugcaucauaauugauu

SEQ ID NO: 18562 - DNA, 21 bp, Homo sapiens
gatgcatctgctgctagagtt

SEQ ID NO: 18563 - RNA, 21 nt, RNAi-sense strand
ugcaucugcugcuagaguuuu

SEQ ID NO: 18564 - RNA, 21 nt, RNAi-antisense strand
aacucuagcagcagaugcauu

SEQ ID NO: 18565 - DNA, 21 bp, Homo sapiens
gatcacaactgtgctgacaat

SEQ ID NO: 18566 - RNA, 21 nt, RNAi-sense strand
ucacaacugugcugacaauuu

SEQ ID NO: 18567 - RNA, 21 nt, RNAi-antisense strand
auugucagcacaguugugauu

SEQ ID NO: 18568 - DNA, 21 bp, Homo sapiens
gacaatgacaaccatcaacac

SEQ ID NO: 18569 - RNA, 21 nt, RNAi-sense strand
caaugacaaccaucaacacuu

SEQ ID NO: 18570 - RNA, 21 nt, RNAi-antisense strand
guguugaugguugucauuguu

SEQ ID NO: 18571 - DNA, 21 bp, Homo sapiens
gagtatgcctttgtcaactac

SEQ ID NO: 18572 - RNA, 21 nt, RNAi-sense strand
guaugccuuugucaacuacuu

SEQ ID NO: 18573 - RNA, 21 nt, RNAi-antisense strand
guaguugacaaaggcauacuu

SEQ ID NO: 18574 - DNA, 21 bp, Homo sapiens
gacagccaaggcaaagaatga

SEQ ID NO: 18575 - RNA, 21 nt, RNAi-sense strand
cagccaaggcaaagaaugauu

SEQ ID NO: 18576 - RNA, 21 nt, RNAi-antisense strand
ucauucuuugccuuggcuguu

SEQ ID NO: 18577 - DNA, 21 bp, Homo sapiens
gaatgaccgttcaaagagcga

SEQ ID NO: 18578 - RNA, 21 nt, RNAi-sense strand
augaccguucaaagagcgauu

SEQ ID NO: 18579 - RNA, 21 nt, RNAi-antisense strand
ucgcucuuugaacggucauuu

SEQ ID NO: 18580 - DNA, 21 bp, Homo sapiens
gaccgttcaaagagcgaaagc

SEQ ID NO: 18581 - RNA, 21 nt, RNAi-sense strand
ccguucaaagagcgaaagcuu

SEQ ID NO: 18582 - RNA, 21 nt, RNAi-antisense strand
gcuuucgcucuuugaacgguu

SEQ ID NO: 18583 - DNA, 21 bp, Homo sapiens
gatgctcatggaaatattctg

SEQ ID NO: 18584 - RNA, 21 nt, RNAi-sense strand
ugcucauggaaauauucuguu

SEQ ID NO: 18585 - RNA, 21 nt, RNAi-antisense strand
cagaauauuuccaugagcauu

SEQ ID NO: 18586 - DNA, 21 bp, Homo sapiens
gaaatattctgttgacatcgc

SEQ ID NO: 18587 - RNA, 21 nt, RNAi-sense strand
aauauucuguugacaucgcuu

SEQ ID NO: 18588 - RNA, 21 nt, RNAi-antisense strand
gcgaugucaacagaauauuuu

SEQ ID NO: 18589 - DNA, 21 bp, Homo sapiens
gacatcgctggaagttcacaa

SEQ ID NO: 18590 - RNA, 21 nt, RNAi-sense strand
caucgcuggaaguucacaauu

SEQ ID NO: 18591 - RNA, 21 nt, RNAi-antisense strand
uugugaacuuccagcgauguu

SEQ ID NO: 18592 - DNA, 21 bp, Homo sapiens
gaaatgaatgaggtctcaggc

SEQ ID NO: 18593 - RNA, 21 nt, RNAi-sense strand
aaugaaugaggucucaggcuu

SEQ ID NO: 18594 - RNA, 21 nt, RNAi-antisense strand
gccugagaccucauucauuuu

SEQ ID NO: 18595 - DNA, 21 bp, Homo sapiens
gaatgaggtctcaggcggcat

SEQ ID NO: 18596 - RNA, 21 nt, RNAi-sense strand
augaggucucaggcggcauuu

SEQ ID NO: 18597 - RNA, 21 nt, RNAi-antisense strand
augccgccugagaccucauuu

SEQ ID NO: 18598 - DNA, 21 bp, Homo sapiens
gataccaggaattcagcaata

SEQ ID NO: 18599 - RNA, 21 nt, RNAi-sense strand
uaccaggaauucagcaauauu

SEQ ID NO: 18600 - RNA, 21 nt, RNAi-antisense strand
uauugcugaauuccugguauu

SEQ ID NO: 18601 - DNA, 21 bp, Homo sapiens
gaattcagcaatatcctttga

SEQ ID NO: 18602 - RNA, 21 nt, RNAi-sense strand
auucagcaauauccuuugauu

SEQ ID NO: 18603 - RNA, 21 nt, RNAi-antisense strand
ucaaaggauauugcugaauuu

SEQ ID NO: 18604 - DNA, 21 bp, Homo sapiens
gacaactcaggaatccagtac

SEQ ID NO: 18605 - RNA, 21 nt, RNAi-sense strand
caacucaggaauccaguacuu

SEQ ID NO: 18606 - RNA, 21 nt, RNAi-antisense strand
guacuggauuccugaguuguu

SEQ ID NO: 18607 - DNA, 21 bp, Homo sapiens
gaatccagtacaggaaacaga

SEQ ID NO: 18608 - RNA, 21 nt, RNAi-sense strand
auccaguacaggaaacagauu

SEQ ID NO: 18609 - RNA, 21 nt, RNAi-antisense strand
ucuguuuccuguacuggauuu

SEQ ID NO: 18610 - DNA, 21 bp, Homo sapiens
gaaacagagcatgcctcgaga

SEQ ID NO: 18611 - RNA, 21 nt, RNAi-sense strand
aacagagcaugccucgagauu

SEQ ID NO: 18612 - RNA, 21 nt, RNAi-antisense strand
ucucgaggcaugcucuguuuu

SEQ ID NO: 18613 - DNA, 21 bp, Homo sapiens
gaggaggtcttcacagctcaa

SEQ ID NO: 18614 - RNA, 21 nt, RNAi-sense strand
ggaggucuucacagcucaauu

SEQ ID NO: 18615 - RNA, 21 nt, RNAi-antisense strand
uugagcugugaagaccuccuu

SEQ ID NO: 18616 - DNA, 21 bp, Homo sapiens
gatctaaccgatgtgaatgcc

SEQ ID NO: 18617 - RNA, 21 nt, RNAi-sense strand
ucuaaccgaugugaaugccuu

SEQ ID NO: 18618 - RNA, 21 nt, RNAi-antisense strand
ggcauucacaucgguuagauu

SEQ ID NO: 18619 - DNA, 21 bp, Homo sapiens
gatgtgaatgccatagacaga

SEQ ID NO: 18620 - RNA, 21 nt, RNAi-sense strand
ugugaaugccauagacagauu

SEQ ID NO: 18621 - RNA, 21 nt, RNAi-antisense strand
ucugucuauggcauucacauu

SEQ ID NO: 18622 - DNA, 21 bp, Homo sapiens
gaatgccatagacagatggtc

SEQ ID NO: 18623 - RNA, 21 nt, RNAi-sense strand
augccauagacagauggucuu

SEQ ID NO: 18624 - RNA, 21 nt, RNAi-antisense strand
gaccaucugucuauggcauuu

SEQ ID NO: 18625 - DNA, 21 bp, Homo sapiens
gacagatggtccaggatcgtg

SEQ ID NO: 18626 - RNA, 21 nt, RNAi-sense strand
cagaugguccaggaucguguu

SEQ ID NO: 18627 - RNA, 21 nt, RNAi-antisense strand
cacgauccuggaccaucuguu

SEQ ID NO: 18628 - DNA, 21 bp, Homo sapiens
gatggtccaggatcgtgtttc

SEQ ID NO: 18629 - RNA, 21 nt, RNAi-sense strand
ugguccaggaucguguuucuu

SEQ ID NO: 18630 - RNA, 21 nt, RNAi-antisense strand
gaaacacgauccuggaccauu

SEQ ID NO: 18631 - DNA, 21 bp, Homo sapiens
gatcgtgtttccattcacttt

SEQ ID NO: 18632 - RNA, 21 nt, RNAi-sense strand
ucguguuuccauucacuuuuu

SEQ ID NO: 18633 - RNA, 21 nt, RNAi-antisense strand
aaagugaauggaaacacgauu

SEQ ID NO: 18634 - DNA, 21 bp, Homo sapiens
gacttcatttaacactgagtg

SEQ ID NO: 18635 - RNA, 21 nt, RNAi-sense strand
cuucauuuaacacugaguguu

SEQ ID NO: 18636 - RNA, 21 nt, RNAi-antisense strand
cacucaguguuaaaugaaguu

SEQ ID NO: 18637 - DNA, 21 bp, Homo sapiens
gagtgaaatattactctgcct

SEQ ID NO: 18638 - RNA, 21 nt, RNAi-sense strand
gugaaauauuacucugccuuu

SEQ ID NO: 18639 - RNA, 21 nt, RNAi-antisense strand
aggcagaguaauauuucacuu

SEQ ID NO: 18640 - DNA, 21 bp, Homo sapiens
gaaatattactctgcctgtca

SEQ ID NO: 18641 - RNA, 21 nt, RNAi-sense strand
aauauuacucugccugucauu

SEQ ID NO: 18642 - RNA, 21 nt, RNAi-antisense strand
ugacaggcagaguaauauuuu

SEQ ID NO: 18643 - DNA, 21 bp, Homo sapiens
gacacacaagcagacacacac

SEQ ID NO: 18644 - RNA, 21 nt, RNAi-sense strand
cacacaagcagacacacacuu

SEQ ID NO: 18645 - RNA, 21 nt, RNAi-antisense strand
gugugugucugcuuguguguu

SEQ ID NO: 18646 - DNA, 21 bp, Homo sapiens
gacacacacatatatacatac

SEQ ID NO: 18647 - RNA, 21 nt, RNAi-sense strand
cacacacauauauacauacuu

SEQ ID NO: 18648 - RNA, 21 nt, RNAi-antisense strand
guauguauauauguguguguu

SEQ ID NO: 18649 - DNA, 21 bp, Homo sapiens
gaggatgtatgtgtatatgtt

SEQ ID NO: 18650 - RNA, 21 nt, RNAi-sense strand
ggauguauguguauauguuuu

SEQ ID NO: 18651 - RNA, 21 nt, RNAi-antisense strand
aacauauacacauacauccuu

SEQ ID NO: 18652 - DNA, 21 bp, Homo sapiens
gacaatttaccacaggatgca

SEQ ID NO: 18653 - RNA, 21 nt, RNAi-sense strand
caauuuaccacaggaugcauu

SEQ ID NO: 18654 - RNA, 21 nt, RNAi-antisense strand
ugcauccugugguaaauuguu

SEQ ID NO: 18655 - DNA, 21 bp, Homo sapiens
gagtcacttacttcatatcct

SEQ ID NO: 18656 - RNA, 21 nt, RNAi-sense strand
gucacuuacuucauauccuuu

SEQ ID NO: 18657 - RNA, 21 nt, RNAi-antisense strand
aggauaugaaguaagugacuu

SEQ ID NO: 18658 - DNA, 21 bp, Homo sapiens
gagccactggcagtgtgctta

SEQ ID NO: 18659 - RNA, 21 nt, RNAi-sense strand
gccacuggcagugugcuuauu

SEQ ID NO: 18660 - RNA, 21 nt, RNAi-antisense strand
uaagcacacugccaguggcuu

SEQ ID NO: 18661 - DNA, 21 bp, Homo sapiens
gatgtctgaacgaccgtcttt

SEQ ID NO: 18662 - RNA, 21 nt, RNAi-sense strand
ugucugaacgaccgucuuuuu

SEQ ID NO: 18663 - RNA, 21 nt, RNAi-antisense strand
aaagacggucguucagacauu

SEQ ID NO: 18664 - DNA, 21 bp, Homo sapiens
gagtgaatggcatctcgttgt

SEQ ID NO: 18665 - RNA, 21 nt, RNAi-sense strand
gugaauggcaucucguuguuu

SEQ ID NO: 18666 - RNA, 21 nt, RNAi-antisense strand
acaacgagaugccauucacuu

SEQ ID NO: 18667 - DNA, 21 bp, Homo sapiens
gaatggcatctcgttgtaagt

SEQ ID NO: 18668 - RNA, 21 nt, RNAi-sense strand
auggcaucucguuguaaguuu

SEQ ID NO: 18669 - RNA, 21 nt, RNAi-antisense strand
acuuacaacgagaugccauuu

SEQ ID NO: 18670 - DNA, 21 bp, Homo sapiens
gagtggatccagcttcactgt

SEQ ID NO: 18671 - RNA, 21 nt, RNAi-sense strand
guggauccagcuucacuguuu

SEQ ID NO: 18672 - RNA, 21 nt, RNAi-antisense strand
acagugaagcuggauccacuu

SEQ ID NO: 18673 - DNA, 21 bp, Homo sapiens
gatccagcttcactgtcatgt

SEQ ID NO: 18674 - RNA, 21 nt, RNAi-sense strand
uccagcuucacugucauguuu

SEQ ID NO: 18675 - RNA, 21 nt, RNAi-antisense strand
acaugacagugaagcuggauu

SEQ ID NO: 18676 - DNA, 21 bp, Homo sapiens
gaacacagtgacacgtttggc

SEQ ID NO: 18677 - RNA, 21 nt, RNAi-sense strand
acacagugacacguuuggcuu

SEQ ID NO: 18678 - RNA, 21 nt, RNAi-antisense strand
gccaaacgugucacuguguuu

SEQ ID NO: 18679 - DNA, 21 bp, Homo sapiens
gacacgtttggccagtgacat

SEQ ID NO: 18680 - RNA, 21 nt, RNAi-sense strand
cacguuuggccagugacauuu

SEQ ID NO: 18681 - RNA, 21 nt, RNAi-antisense strand
augucacuggccaaacguguu

SEQ ID NO: 18682 - DNA, 21 bp, Homo sapiens
gatttctaggcctgatatcca

SEQ ID NO: 18683 - RNA, 21 nt, RNAi-sense strand
uuucuaggccugauauccauu

SEQ ID NO: 18684 - RNA, 21 nt, RNAi-antisense strand
uggauaucaggccuagaaauu

SEQ ID NO: 18685 - DNA, 21 bp, Homo sapiens
gatatccaacagaaagcatag

SEQ ID NO: 18686 - RNA, 21 nt, RNAi-sense strand
uauccaacagaaagcauaguu

SEQ ID NO: 18687 - RNA, 21 nt, RNAi-antisense strand
cuaugcuuucuguuggauauu

SEQ ID NO: 18688 - DNA, 21 bp, Homo sapiens
gaaagcatagacgtctcaggt

SEQ ID NO: 18689 - RNA, 21 nt, RNAi-sense strand
aagcauagacgucucagguuu

SEQ ID NO: 18690 - RNA, 21 nt, RNAi-antisense strand
accugagacgucuaugcuuuu

SEQ ID NO: 18691 - DNA, 21 bp, Homo sapiens
gacgtctcaggttattcgtta

SEQ ID NO: 18692 - RNA, 21 nt, RNAi-sense strand
cgucucagguuauucguuauu

SEQ ID NO: 18693 - RNA, 21 nt, RNAi-antisense strand
uaacgaauaaccugagacguu

SEQ ID NO: 18694 - DNA, 21 bp, Homo sapiens
gaaactaagaatcatcctcat

SEQ ID NO: 18695 - RNA, 21 nt, RNAi-sense strand
aacuaagaaucauccucauuu

SEQ ID NO: 18696 - RNA, 21 nt, RNAi-antisense strand
augaggaugauucuuaguuuu

SEQ ID NO: 18697 - DNA, 21 bp, Homo sapiens
gaatcatcctcatgcctttat

SEQ ID NO: 18698 - RNA, 21 nt, RNAi-sense strand
aucauccucaugccuuuauuu

SEQ ID NO: 18699 - RNA, 21 nt, RNAi-antisense strand
auaaaggcaugaggaugauuu

SEQ ID NO: 18700 - DNA, 21 bp, Homo sapiens
gacatatttcataagcacatc

SEQ ID NO: 18701 - RNA, 21 nt, RNAi-sense strand
cauauuucauaagcacaucuu

SEQ ID NO: 18702 - RNA, 21 nt, RNAi-antisense strand
gaugugcuuaugaaauauguu

SEQ ID NO: 18703 - DNA, 21 bp, Homo sapiens
gactgactaggattctgcagg

SEQ ID NO: 18704 - RNA, 21 nt, RNAi-sense strand
cugacuaggauucugcagguu

SEQ ID NO: 18705 - RNA, 21 nt, RNAi-antisense strand
ccugcagaauccuagucaguu

SEQ ID NO: 18706 - DNA, 21 bp, Homo sapiens
gactaggattctgcaggaaca

SEQ ID NO: 18707 - RNA, 21 nt, RNAi-sense strand
cuaggauucugcaggaacauu

SEQ ID NO: 18708 - RNA, 21 nt, RNAi-antisense strand
uguuccugcagaauccuaguu

SEQ ID NO: 18709 - DNA, 21 bp, Homo sapiens
gaccgttctctgaggcaaagg

SEQ ID NO: 18710 - RNA, 21 nt, RNAi-sense strand
ccguucucugaggcaaagguu

SEQ ID NO: 18711 - RNA, 21 nt, RNAi-antisense strand
ccuuugccucagagaacgguu

SEQ ID NO: 18712 - DNA, 21 bp, Homo sapiens
gacagcaaacacagtcactgt

SEQ ID NO: 18713 - RNA, 21 nt, RNAi-sense strand
cagcaaacacagucacuguuu

SEQ ID NO: 18714 - RNA, 21 nt, RNAi-antisense strand
acagugacuguguuugcuguu

SEQ ID NO: 18715 - DNA, 21 bp, Homo sapiens
gatccacagcctcatcagtat

SEQ ID NO: 18716 - RNA, 21 nt, RNAi-sense strand
uccacagccucaucaguauuu

SEQ ID NO: 18717 - RNA, 21 nt, RNAi-antisense strand
auacugaugaggcuguggauu

SEQ ID NO: 18718 - DNA, 21 bp, Homo sapiens
gaaacaagacaaggtgcaccg

SEQ ID NO: 18719 - RNA, 21 nt, RNAi-sense strand
aacaagacaaggugcaccguu

SEQ ID NO: 18720 - RNA, 21 nt, RNAi-antisense strand
cggugcaccuugucuuguuuu

SEQ ID NO: 18721 - DNA, 21 bp, Homo sapiens
gacaaggtgcaccggtttcat

SEQ ID NO: 18722 - RNA, 21 nt, RNAi-sense strand
caaggugcaccgguuucauuu

SEQ ID NO: 18723 - RNA, 21 nt, RNAi-antisense strand
augaaaccggugcaccuuguu

SEQ ID NO: 18724 - DNA, 21 bp, Homo sapiens
gacgcaaccttaacttactat

SEQ ID NO: 18725 - RNA, 21 nt, RNAi-sense strand
cgcaaccuuaacuuacuauuu

SEQ ID NO: 18726 - RNA, 21 nt, RNAi-antisense strand
auaguaaguuaagguugcguu

SEQ ID NO: 18727 - DNA, 21 bp, Homo sapiens
tatggctacaccacggatgac

SEQ ID NO: 18728 - RNA, 21 nt, RNAi-sense strand
uggcuacaccacggaugacuu

SEQ ID NO: 18729 - RNA, 21 nt, RNAi-antisense strand
gucauccgugguguagccauu

SEQ ID NO: 18730 - DNA, 21 bp, Homo sapiens
tacaccacggatgacattgag

SEQ ID NO: 18731 - RNA, 21 nt, RNAi-sense strand
caccacggaugacauugaguu

SEQ ID NO: 18732 - RNA, 21 nt, RNAi-antisense strand
cucaaugucauccgugguguu

SEQ ID NO: 18733 - DNA, 21 bp, Homo sapiens
taccggagtggaaaggattga

SEQ ID NO: 18734 - RNA, 21 nt, RNAi-sense strand
ccggaguggaaaggauugauu

SEQ ID NO: 18735 - RNA, 21 nt, RNAi-antisense strand
ucaauccuuuccacuccgguu

SEQ ID NO: 18736 - DNA, 21 bp, Homo sapiens
tatcctcgactgtcactgagc

SEQ ID NO: 18737 - RNA, 21 nt, RNAi-sense strand
uccucgacugucacugagcuu

SEQ ID NO: 18738 - RNA, 21 nt, RNAi-antisense strand
gcucagugacagucgaggauu

SEQ ID NO: 18739 - DNA, 21 bp, Homo sapiens
tatactgataacgattctgtc

SEQ ID NO: 18740 - RNA, 21 nt, RNAi-sense strand
uacugauaacgauucugucuu

SEQ ID NO: 18741 - RNA, 21 nt, RNAi-antisense strand
gacagaaucguuaucaguauu

SEQ ID NO: 18742 - DNA, 21 bp, Homo sapiens
tactgataacgattctgtcgt

SEQ ID NO: 18743 - RNA, 21 nt, RNAi-sense strand
cugauaacgauucugucguuu

SEQ ID NO: 18744 - RNA, 21 nt, RNAi-antisense strand
acgacagaaucguuaucaguu

SEQ ID NO: 18745 - DNA, 21 bp, Homo sapiens
tatgatgcatctgctgctaga

SEQ ID NO: 18746 - RNA, 21 nt, RNAi-sense strand
ugaugcaucugcugcuagauu

SEQ ID NO: 18747 - RNA, 21 nt, RNAi-antisense strand
ucuagcagcagaugcaucauu

SEQ ID NO: 18748 - DNA, 21 bp, Homo sapiens
tatgtcaaagccattgacatg

SEQ ID NO: 18749 - RNA, 21 nt, RNAi-sense strand
ugucaaagccauugacauguu

SEQ ID NO: 18750 - RNA, 21 nt, RNAi-antisense strand
caugucaauggcuuugacauu

SEQ ID NO: 18751 - DNA, 21 bp, Homo sapiens
tatgcctttgtcaactacatt

SEQ ID NO: 18752 - RNA, 21 nt, RNAi-sense strand
ugccuuugucaacuacauuuu

SEQ ID NO: 18753 - RNA, 21 nt, RNAi-antisense strand
aauguaguugacaaaggcauu

SEQ ID NO: 18754 - DNA, 21 bp, Homo sapiens
tattctgttgacatcgctgga

SEQ ID NO: 18755 - RNA, 21 nt, RNAi-sense strand
uucuguugacaucgcuggauu

SEQ ID NO: 18756 - RNA, 21 nt, RNAi-antisense strand
uccagcgaugucaacagaauu

SEQ ID NO: 18757 - DNA, 21 bp, Homo sapiens
taccaggaattcagcaatatc

SEQ ID NO: 18758 - RNA, 21 nt, RNAi-sense strand
ccaggaauucagcaauaucuu

SEQ ID NO: 18759 - RNA, 21 nt, RNAi-antisense strand
gauauugcugaauuccugguu

SEQ ID NO: 18760 - DNA, 21 bp, Homo sapiens
tatcctttgacaactcaggaa

SEQ ID NO: 18761 - RNA, 21 nt, RNAi-sense strand
uccuuugacaacucaggaauu

SEQ ID NO: 18762 - RNA, 21 nt, RNAi-antisense strand
uuccugaguugucaaaggauu

SEQ ID NO: 18763 - DNA, 21 bp, Homo sapiens
tacaggaaacagagcatgcct

SEQ ID NO: 18764 - RNA, 21 nt, RNAi-sense strand
caggaaacagagcaugccuuu

SEQ ID NO: 18765 - RNA, 21 nt, RNAi-antisense strand
aggcaugcucuguuuccuguu

SEQ ID NO: 18766 - DNA, 21 bp, Homo sapiens
tacggaggaggtcttcacagc

SEQ ID NO: 18767 - RNA, 21 nt, RNAi-sense strand
cggaggaggucuucacagcuu

SEQ ID NO: 18768 - RNA, 21 nt, RNAi-antisense strand
gcugugaagaccuccuccguu

SEQ ID NO: 18769 - DNA, 21 bp, Homo sapiens
tacctgatctaaccgatgtga

SEQ ID NO: 18770 - RNA, 21 nt, RNAi-sense strand
ccugaucuaaccgaugugauu

SEQ ID NO: 18771 - RNA, 21 nt, RNAi-antisense strand
ucacaucgguuagaucagguu

SEQ ID NO: 18772 - DNA, 21 bp, Homo sapiens
taaccgatgtgaatgccatag

SEQ ID NO: 18773 - RNA, 21 nt, RNAi-sense strand
accgaugugaaugccauaguu

SEQ ID NO: 18774 - RNA, 21 nt, RNAi-antisense strand
cuauggcauucacaucgguuu

SEQ ID NO: 18775 - DNA, 21 bp, Homo sapiens
tagacagatggtccaggatcg

SEQ ID NO: 18776 - RNA, 21 nt, RNAi-sense strand
gacagaugguccaggaucguu

SEQ ID NO: 18777 - RNA, 21 nt, RNAi-antisense strand
cgauccuggaccaucugucuu

SEQ ID NO: 18778 - DNA, 21 bp, Homo sapiens
tagtttactggctgtactatg

SEQ ID NO: 18779 - RNA, 21 nt, RNAi-sense strand
guuuacuggcuguacuauguu

SEQ ID NO: 18780 - RNA, 21 nt, RNAi-antisense strand
cauaguacagccaguaaacuu

SEQ ID NO: 18781 - DNA, 21 bp, Homo sapiens
tactggctgtactatgttaac

SEQ ID NO: 18782 - RNA, 21 nt, RNAi-sense strand
cuggcuguacuauguuaacuu

SEQ ID NO: 18783 - RNA, 21 nt, RNAi-antisense strand
guuaacauaguacagccaguu

SEQ ID NO: 18784 - DNA, 21 bp, Homo sapiens
tactatgttaactgagtgact

SEQ ID NO: 18785 - RNA, 21 nt, RNAi-sense strand
cuauguuaacugagugacuuu

SEQ ID NO: 18786 - RNA, 21 nt, RNAi-antisense strand
agucacucaguuaacauaguu

SEQ ID NO: 18787 - DNA, 21 bp, Homo sapiens
tatgttaactgagtgactgta

SEQ ID NO: 18788 - RNA, 21 nt, RNAi-sense strand
uguuaacugagugacuguauu

SEQ ID NO: 18789 - RNA, 21 nt, RNAi-antisense strand
uacagucacucaguuaacauu

SEQ ID NO: 18790 - DNA, 21 bp, Homo sapiens
taactgagtgactgtacttga

SEQ ID NO: 18791 - RNA, 21 nt, RNAi-sense strand
acugagugacuguacuugauu

SEQ ID NO: 18792 - RNA, 21 nt, RNAi-antisense strand
ucaaguacagucacucaguuu

SEQ ID NO: 18793 - DNA, 21 bp, Homo sapiens
tattactctgcctgtcaagtt

SEQ ID NO: 18794 - RNA, 21 nt, RNAi-sense strand
uuacucugccugucaaguuuu

SEQ ID NO: 18795 - RNA, 21 nt, RNAi-antisense strand
aacuugacaggcagaguaauu

SEQ ID NO: 18796 - DNA, 21 bp, Homo sapiens
tatacctgtacacacacagac

SEQ ID NO: 18797 - RNA, 21 nt, RNAi-sense strand
uaccuguacacacacagacuu

SEQ ID NO: 18798 - RNA, 21 nt, RNAi-antisense strand
gucuguguguguacagguauu

SEQ ID NO: 18799 - DNA, 21 bp, Homo sapiens
tacctgtacacacacagacac

SEQ ID NO: 18800 - RNA, 21 nt, RNAi-sense strand
ccuguacacacacagacacuu

SEQ ID NO: 18801 - RNA, 21 nt, RNAi-antisense strand
gugucuguguguguacagguu

SEQ ID NO: 18802 - DNA, 21 bp, Homo sapiens
tacacacacagacacacaagc

SEQ ID NO: 18803 - RNA, 21 nt, RNAi-sense strand
cacacacagacacacaagcuu

SEQ ID NO: 18804 - RNA, 21 nt, RNAi-antisense strand
gcuugugugucuguguguguu

SEQ ID NO: 18805 - DNA, 21 bp, Homo sapiens
tatatgtgaactttctcagca

SEQ ID NO: 18806 - RNA, 21 nt, RNAi-sense strand
uaugugaacuuucucagcauu

SEQ ID NO: 18807 - RNA, 21 nt, RNAi-antisense strand
ugcugagaaaguucacauauu

SEQ ID NO: 18808 - DNA, 21 bp, Homo sapiens
tatgtgaactttctcagcata

SEQ ID NO: 18809 - RNA, 21 nt, RNAi-sense strand
ugugaacuuucucagcauauu

SEQ ID NO: 18810 - RNA, 21 nt, RNAi-antisense strand
uaugcugagaaaguucacauu

SEQ ID NO: 18811 - DNA, 21 bp, Homo sapiens
tacacgtgtatatgaggatgt

SEQ ID NO: 18812 - RNA, 21 nt, RNAi-sense strand
cacguguauaugaggauguuu

SEQ ID NO: 18813 - RNA, 21 nt, RNAi-antisense strand
acauccucauauacacguguu

SEQ ID NO: 18814 - DNA, 21 bp, Homo sapiens
tatgtttatacacacaggagt

SEQ ID NO: 18815 - RNA, 21 nt, RNAi-sense strand
uguuuauacacacaggaguuu

SEQ ID NO: 18816 - RNA, 21 nt, RNAi-antisense strand
acuccuguguguauaaacauu

SEQ ID NO: 18817 - DNA, 21 bp, Homo sapiens
tatacacacaggagtcagtgc

SEQ ID NO: 18818 - RNA, 21 nt, RNAi-sense strand
uacacacaggagucagugcuu

SEQ ID NO: 18819 - RNA, 21 nt, RNAi-antisense strand
gcacugacuccuguguguauu

SEQ ID NO: 18820 - DNA, 21 bp, Homo sapiens
tatggacaatttaccacagga

SEQ ID NO: 18821 - RNA, 21 nt, RNAi-sense strand
uggacaauuuaccacaggauu

SEQ ID NO: 18822 - RNA, 21 nt, RNAi-antisense strand
uccugugguaaauuguccauu

SEQ ID NO: 18823 - DNA, 21 bp, Homo sapiens
taccacaggatgcatattaaa

SEQ ID NO: 18824 - RNA, 21 nt, RNAi-sense strand
ccacaggaugcauauuaaauu

SEQ ID NO: 18825 - RNA, 21 nt, RNAi-antisense strand
uuuaauaugcauccugugguu

SEQ ID NO: 18826 - DNA, 21 bp, Homo sapiens
tattatgccttgagaatgagg

SEQ ID NO: 18827 - RNA, 21 nt, RNAi-sense strand
uuaugccuugagaaugagguu

SEQ ID NO: 18828 - RNA, 21 nt, RNAi-antisense strand
ccucauucucaaggcauaauu

SEQ ID NO: 18829 - DNA, 21 bp, Homo sapiens
tacagtggtattgctagttta

SEQ ID NO: 18830 - RNA, 21 nt, RNAi-sense strand
cagugguauugcuaguuuauu

SEQ ID NO: 18831 - RNA, 21 nt, RNAi-antisense strand
uaaacuagcaauaccacuguu

SEQ ID NO: 18832 - DNA, 21 bp, Homo sapiens
tacttcatatcctctcgttca

SEQ ID NO: 18833 - RNA, 21 nt, RNAi-sense strand
cuucauauccucucguucauu

SEQ ID NO: 18834 - RNA, 21 nt, RNAi-antisense strand
ugaacgagaggauaugaaguu

SEQ ID NO: 18835 - DNA, 21 bp, Homo sapiens
tatcctctcgttcagtttagt

SEQ ID NO: 18836 - RNA, 21 nt, RNAi-sense strand
uccucucguucaguuuaguuu

SEQ ID NO: 18837 - RNA, 21 nt, RNAi-antisense strand
acuaaacugaacgagaggauu

SEQ ID NO: 18838 - DNA, 21 bp, Homo sapiens
tagtaagcaaaggcttcttgg

SEQ ID NO: 18839 - RNA, 21 nt, RNAi-sense strand
guaagcaaaggcuucuugguu

SEQ ID NO: 18840 - RNA, 21 nt, RNAi-antisense strand
ccaagaagccuuugcuuacuu

SEQ ID NO: 18841 - DNA, 21 bp, Homo sapiens
taagcaaaggcttcttggctt

SEQ ID NO: 18842 - RNA, 21 nt, RNAi-sense strand
agcaaaggcuucuuggcuuuu

SEQ ID NO: 18843 - RNA, 21 nt, RNAi-antisense strand
aagccaagaagccuuugcuuu

SEQ ID NO: 18844 - DNA, 21 bp, Homo sapiens
tacctgttgtctgaaacatag

SEQ ID NO: 18845 - RNA, 21 nt, RNAi-sense strand
ccuguugucugaaacauaguu

SEQ ID NO: 18846 - RNA, 21 nt, RNAi-antisense strand
cuauguuucagacaacagguu

SEQ ID NO: 18847 - DNA, 21 bp, Homo sapiens
tacagtgtgtagtttgtttct

SEQ ID NO: 18848 - RNA, 21 nt, RNAi-sense strand
caguguguaguuuguuucuuu

SEQ ID NO: 18849 - RNA, 21 nt, RNAi-antisense strand
agaaacaaacuacacacuguu

SEQ ID NO: 18850 - DNA, 21 bp, Homo sapiens
tagtttgtttctgttgttcac

SEQ ID NO: 18851 - RNA, 21 nt, RNAi-sense strand
guuuguuucuguuguucacuu

SEQ ID NO: 18852 - RNA, 21 nt, RNAi-antisense strand
gugaacaacagaaacaaacuu

SEQ ID NO: 18853 - DNA, 21 bp, Homo sapiens
tacatctcgtatggatttcta

SEQ ID NO: 18854 - RNA, 21 nt, RNAi-sense strand
caucucguauggauuucuauu

SEQ ID NO: 18855 - RNA, 21 nt, RNAi-antisense strand
uagaaauccauacgagauguu

SEQ ID NO: 18856 - DNA, 21 bp, Homo sapiens
tatggatttctaggcctgata

SEQ ID NO: 18857 - RNA, 21 nt, RNAi-sense strand
uggauuucuaggccugauauu

SEQ ID NO: 18858 - RNA, 21 nt, RNAi-antisense strand
uaucaggccuagaaauccauu

SEQ ID NO: 18859 - DNA, 21 bp, Homo sapiens
taggcctgatatccaacagaa

SEQ ID NO: 18860 - RNA, 21 nt, RNAi-sense strand
ggccugauauccaacagaauu

SEQ ID NO: 18861 - RNA, 21 nt, RNAi-antisense strand
uucuguuggauaucaggccuu

SEQ ID NO: 18862 - DNA, 21 bp, Homo sapiens
tatccaacagaaagcatagac

SEQ ID NO: 18863 - RNA, 21 nt, RNAi-sense strand
uccaacagaaagcauagacuu

SEQ ID NO: 18864 - RNA, 21 nt, RNAi-antisense strand
gucuaugcuuucuguuggauu

SEQ ID NO: 18865 - DNA, 21 bp, Homo sapiens
tagacgtctcaggttattcgt

SEQ ID NO: 18866 - RNA, 21 nt, RNAi-sense strand
gacgucucagguuauucguuu

SEQ ID NO: 18867 - RNA, 21 nt, RNAi-antisense strand
acgaauaaccugagacgucuu

SEQ ID NO: 18868 - DNA, 21 bp, Homo sapiens
tacgcttgctatcatggcagc

SEQ ID NO: 18869 - RNA, 21 nt, RNAi-sense strand
cgcuugcuaucauggcagcuu

SEQ ID NO: 18870 - RNA, 21 nt, RNAi-antisense strand
gcugccaugauagcaagcguu

SEQ ID NO: 18871 - DNA, 21 bp, Homo sapiens
tatcatggcagcatgcgatgt

SEQ ID NO: 18872 - RNA, 21 nt, RNAi-sense strand
ucauggcagcaugcgauguuu

SEQ ID NO: 18873 - RNA, 21 nt, RNAi-antisense strand
acaucgcaugcugccaugauu

SEQ ID NO: 18874 - DNA, 21 bp, Homo sapiens
taagaatcatcctcatgcctt

SEQ ID NO: 18875 - RNA, 21 nt, RNAi-sense strand
agaaucauccucaugccuuuu

SEQ ID NO: 18876 - RNA, 21 nt, RNAi-antisense strand
aaggcaugaggaugauucuuu

SEQ ID NO: 18877 - DNA, 21 bp, Homo sapiens
tatttcataagcacatccaac

SEQ ID NO: 18878 - RNA, 21 nt, RNAi-sense strand
uuucauaagcacauccaacuu

SEQ ID NO: 18879 - RNA, 21 nt, RNAi-antisense strand
guuggaugugcuuaugaaauu

SEQ ID NO: 18880 - DNA, 21 bp, Homo sapiens
taagcacatccaactactcct

SEQ ID NO: 18881 - RNA, 21 nt, RNAi-sense strand
agcacauccaacuacuccuuu

SEQ ID NO: 18882 - RNA, 21 nt, RNAi-antisense strand
aggaguaguuggaugugcuuu

SEQ ID NO: 18883 - DNA, 21 bp, Homo sapiens
tactcctagactgactaggat

SEQ ID NO: 18884 - RNA, 21 nt, RNAi-sense strand
cuccuagacugacuaggauuu

SEQ ID NO: 18885 - RNA, 21 nt, RNAi-antisense strand
auccuagucagucuaggaguu

SEQ ID NO: 18886 - DNA, 21 bp, Homo sapiens
tagactgactaggattctgca

SEQ ID NO: 18887 - RNA, 21 nt, RNAi-sense strand
gacugacuaggauucugcauu

SEQ ID NO: 18888 - RNA, 21 nt, RNAi-antisense strand
ugcagaauccuagucagucuu

SEQ ID NO: 18889 - DNA, 21 bp, Homo sapiens
taggattctgcaggaacatga

SEQ ID NO: 18890 - RNA, 21 nt, RNAi-sense strand
ggauucugcaggaacaugauu

SEQ ID NO: 18891 - RNA, 21 nt, RNAi-antisense strand
ucauguuccugcagaauccuu

SEQ ID NO: 18892 - DNA, 21 bp, Homo sapiens
taaagctcgtagaaacaagac

SEQ ID NO: 18893 - RNA, 21 nt, RNAi-sense strand
aagcucguagaaacaagacuu

SEQ ID NO: 18894 - RNA, 21 nt, RNAi-antisense strand
gucuuguuucuacgagcuuuu

SEQ ID NO: 18895 - DNA, 21 bp, Homo sapiens
tagaaacaagacaaggtgcac

SEQ ID NO: 18896 - RNA, 21 nt, RNAi-sense strand
gaaacaagacaaggugcacuu

SEQ ID NO: 18897 - RNA, 21 nt, RNAi-antisense strand
gugcaccuugucuuguuucuu

SEQ ID NO: 18898 - DNA, 21 bp, Homo sapiens
tagacgcaaccttaacttact

SEQ ID NO: 18899 - RNA, 21 nt, RNAi-sense strand
gacgcaaccuuaacuuacuuu

SEQ ID NO: 18900 - RNA, 21 nt, RNAi-antisense strand
aguaaguuaagguugcgucuu

SEQ ID NO: 18901 - DNA, 21 bp, Homo sapiens
aacctcacgcttgacaatcga

SEQ ID NO: 18902 - RNA, 21 nt, RNAi-sense strand
ccucacgcuugacaaucgauu

SEQ ID NO: 18903 - RNA, 21 nt, RNAi-antisense strand
ucgauugucaagcgugagguu

SEQ ID NO: 18904 - DNA, 21 bp, Homo sapiens
aaaccgcatgatccgtcttca

SEQ ID NO: 18905 - RNA, 21 nt, RNAi-sense strand
accgcaugauccgucuucauu

SEQ ID NO: 18906 - RNA, 21 nt, RNAi-antisense strand
ugaagacggaucaugcgguuu

SEQ ID NO: 18907 - DNA, 21 bp, Homo sapiens
aatgttgtcttcgccacaggt

SEQ ID NO: 18908 - RNA, 21 nt, RNAi-sense strand
uguugucuucgccacagguuu

SEQ ID NO: 18909 - RNA, 21 nt, RNAi-antisense strand
accuguggcgaagacaacauu

SEQ ID NO: 18910 - DNA, 21 bp, Homo sapiens
aaaggcagaagaagcttgcag

SEQ ID NO: 18911 - RNA, 21 nt, RNAi-sense strand
aggcagaagaagcuugcaguu

SEQ ID NO: 18912 - RNA, 21 nt, RNAi-antisense strand
cugcaagcuucuucugccuuu

SEQ ID NO: 18913 - DNA, 21 bp, Homo sapiens
aaggcagaagaagcttgcaga

SEQ ID NO: 18914 - RNA, 21 nt, RNAi-sense strand
ggcagaagaagcuugcagauu

SEQ ID NO: 18915 - RNA, 21 nt, RNAi-antisense strand
ucugcaagcuucuucugccuu

SEQ ID NO: 18916 - DNA, 21 bp, Homo sapiens
aaggcaaagaatgaccgttca

SEQ ID NO: 18917 - RNA, 21 nt, RNAi-sense strand
ggcaaagaaugaccguucauu

SEQ ID NO: 18918 - RNA, 21 nt, RNAi-antisense strand
ugaacggucauucuuugccuu

SEQ ID NO: 18919 - DNA, 21 bp, Homo sapiens
aaagaatgaccgttcaaagag

SEQ ID NO: 18920 - RNA, 21 nt, RNAi-sense strand
agaaugaccguucaaagaguu

SEQ ID NO: 18921 - RNA, 21 nt, RNAi-antisense strand
cucuuugaacggucauucuuu

SEQ ID NO: 18922 - DNA, 21 bp, Homo sapiens
aagaatgaccgttcaaagagc

SEQ ID NO: 18923 - RNA, 21 nt, RNAi-sense strand
gaaugaccguucaaagagcuu

SEQ ID NO: 18924 - RNA, 21 nt, RNAi-antisense strand
gcucuuugaacggucauucuu

SEQ ID NO: 18925 - DNA, 21 bp, Homo sapiens
aatgaccgttcaaagagcgaa

SEQ ID NO: 18926 - RNA, 21 nt, RNAi-sense strand
ugaccguucaaagagcgaauu

SEQ ID NO: 18927 - RNA, 21 nt, RNAi-antisense strand
uucgcucuuugaacggucauu

SEQ ID NO: 18928 - DNA, 21 bp, Homo sapiens
aaatattctgttgacatcgct

SEQ ID NO: 18929 - RNA, 21 nt, RNAi-sense strand
auauucuguugacaucgcuuu

SEQ ID NO: 18930 - RNA, 21 nt, RNAi-antisense strand
agcgaugucaacagaauauuu

SEQ ID NO: 18931 - DNA, 21 bp, Homo sapiens
aatattctgttgacatcgctg

SEQ ID NO: 18932 - RNA, 21 nt, RNAi-sense strand
uauucuguugacaucgcuguu

SEQ ID NO: 18933 - RNA, 21 nt, RNAi-antisense strand
cagcgaugucaacagaauauu

SEQ ID NO: 18934 - DNA, 21 bp, Homo sapiens
aactcaggaatccagtacagg

SEQ ID NO: 18935 - RNA, 21 nt, RNAi-sense strand
cucaggaauccaguacagguu

SEQ ID NO: 18936 - RNA, 21 nt, RNAi-antisense strand
ccuguacuggauuccugaguu

SEQ ID NO: 18937 - DNA, 21 bp, Homo sapiens
aaacagagcatgcctcgagaa

SEQ ID NO: 18938 - RNA, 21 nt, RNAi-sense strand
acagagcaugccucgagaauu

SEQ ID NO: 18939 - RNA, 21 nt, RNAi-antisense strand
uucucgaggcaugcucuguuu

SEQ ID NO: 18940 - DNA, 21 bp, Homo sapiens
aaatacctgatctaaccgatg

SEQ ID NO: 18941 - RNA, 21 nt, RNAi-sense strand
auaccugaucuaaccgauguu

SEQ ID NO: 18942 - RNA, 21 nt, RNAi-antisense strand
caucgguuagaucagguauuu

SEQ ID NO: 18943 - DNA, 21 bp, Homo sapiens
aatacctgatctaaccgatgt

SEQ ID NO: 18944 - RNA, 21 nt, RNAi-sense strand
uaccugaucuaaccgauguuu

SEQ ID NO: 18945 - RNA, 21 nt, RNAi-antisense strand
acaucgguuagaucagguauu

SEQ ID NO: 18946 - DNA, 21 bp, Homo sapiens
cagcatcgacatggtttccga

SEQ ID NO: 18947 - RNA, 21 nt, RNAi-sense strand
gcaucgacaugguuuccgauu

SEQ ID NO: 18948 - RNA, 21 nt, RNAi-antisense strand
ucggaaaccaugucgaugcuu

SEQ ID NO: 18949 - DNA, 21 bp, Homo sapiens
caacctcacgcttgacaatcg

SEQ ID NO: 18950 - RNA, 21 nt, RNAi-sense strand
accucacgcuugacaaucguu

SEQ ID NO: 18951 - RNA, 21 nt, RNAi-antisense strand
cgauugucaagcgugagguuu

SEQ ID NO: 18952 - DNA, 21 bp, Homo sapiens
cactgagctttcggttgaaga

SEQ ID NO: 18953 - RNA, 21 nt, RNAi-sense strand
cugagcuuucgguugaagauu

SEQ ID NO: 18954 - RNA, 21 nt, RNAi-antisense strand
ucuucaaccgaaagcucaguu

SEQ ID NO: 18955 - DNA, 21 bp, Homo sapiens
caaggcaaagaatgaccgttc

SEQ ID NO: 18956 - RNA, 21 nt, RNAi-sense strand
aggcaaagaaugaccguucuu

SEQ ID NO: 18957 - RNA, 21 nt, RNAi-antisense strand
gaacggucauucuuugccuuu

SEQ ID NO: 18958 - DNA, 21 bp, Homo sapiens
caaagaatgaccgttcaaaga

SEQ ID NO: 18959 - RNA, 21 nt, RNAi-sense strand
aagaaugaccguucaaagauu

SEQ ID NO: 18960 - RNA, 21 nt, RNAi-antisense strand
ucuuugaacggucauucuuuu

SEQ ID NO: 18961 - DNA, 21 bp, Homo sapiens
cattggcgataccaggaattc

SEQ ID NO: 18962 - RNA, 21 nt, RNAi-sense strand
uuggcgauaccaggaauucuu

SEQ ID NO: 18963 - RNA, 21 nt, RNAi-antisense strand
gaauuccugguaucgccaauu

SEQ ID NO: 18964 - DNA, 21 bp, Homo sapiens
caactcaggaatccagtacag

SEQ ID NO: 18965 - RNA, 21 nt, RNAi-sense strand
acucaggaauccaguacaguu

SEQ ID NO: 18966 - RNA, 21 nt, RNAi-antisense strand
cuguacuggauuccugaguuu

SEQ ID NO: 18967 - DNA, 21 bp, Homo sapiens
catctacggaggaggtcttca

SEQ ID NO: 18968 - RNA, 21 nt, RNAi-sense strand
ucuacggaggaggucuucauu

SEQ ID NO: 18969 - RNA, 21 nt, RNAi-antisense strand
ugaagaccuccuccguagauu

SEQ ID NO: 18970 - DNA, 21 bp, Homo sapiens
gatgaacatcgacatcgccag

SEQ ID NO: 18971 - RNA, 21 nt, RNAi-sense strand
ugaacaucgacaucgccaguu

SEQ ID NO: 18972 - RNA, 21 nt, RNAi-antisense strand
cuggcgaugucgauguucauu

SEQ ID NO: 18973 - DNA, 21 bp, Homo sapiens
gaacatcgacatcgccagcat

SEQ ID NO: 18974 - RNA, 21 nt, RNAi-sense strand
acaucgacaucgccagcauuu

SEQ ID NO: 18975 - RNA, 21 nt, RNAi-antisense strand
augcuggcgaugucgauguuu

SEQ ID NO: 18976 - DNA, 21 bp, Homo sapiens
gaaagctatggctacaccacg

SEQ ID NO: 18977 - RNA, 21 nt, RNAi-sense strand
aagcuauggcuacaccacguu

SEQ ID NO: 18978 - RNA, 21 nt, RNAi-antisense strand
cgugguguagccauagcuuuu

SEQ ID NO: 18979 - DNA, 21 bp, Homo sapiens
gaggaatgttgtcttcgccac

SEQ ID NO: 18980 - RNA, 21 nt, RNAi-sense strand
ggaauguugucuucgccacuu

SEQ ID NO: 18981 - RNA, 21 nt, RNAi-antisense strand
guggcgaagacaacauuccuu

SEQ ID NO: 18982 - DNA, 21 bp, Homo sapiens
gaatgttgtcttcgccacagg

SEQ ID NO: 18983 - RNA, 21 nt, RNAi-sense strand
auguugucuucgccacagguu

SEQ ID NO: 18984 - RNA, 21 nt, RNAi-antisense strand
ccuguggcgaagacaacauuu

SEQ ID NO: 18985 - DNA, 21 bp, Homo sapiens
gaatgaccgttcaaagagcga

SEQ ID NO: 18986 - RNA, 21 nt, RNAi-sense strand
augaccguucaaagagcgauu

SEQ ID NO: 18987 - RNA, 21 nt, RNAi-antisense strand
ucgcucuuugaacggucauuu

SEQ ID NO: 18988 - DNA, 21 bp, Homo sapiens
gaccgttcaaagagcgaaagc

SEQ ID NO: 18989 - RNA, 21 nt, RNAi-sense strand
ccguucaaagagcgaaagcuu

SEQ ID NO: 18990 - RNA, 21 nt, RNAi-antisense strand
gcuuucgcucuuugaacgguu

SEQ ID NO: 18991 - DNA, 21 bp, Homo sapiens
gaaacagagcatgcctcgaga

SEQ ID NO: 18992 - RNA, 21 nt, RNAi-sense strand
aacagagcaugccucgagauu

SEQ ID NO: 18993 - RNA, 21 nt, RNAi-antisense strand
ucucgaggcaugcucuguuuu

SEQ ID NO: 18994 - DNA, 21 bp, Homo sapiens
gatctaaccgatgtgaatgcc

SEQ ID NO: 18995 - RNA, 21 nt, RNAi-sense strand
ucuaaccgaugugaaugccuu

SEQ ID NO: 18996 - RNA, 21 nt, RNAi-antisense strand
ggcauucacaucgguuagauu

SEQ ID NO: 18997 - DNA, 21 bp, Homo sapiens
tacaccacggatgacattgag

SEQ ID NO: 18998 - RNA, 21 nt, RNAi-sense strand
caccacggaugacauugaguu

SEQ ID NO: 18999 - RNA, 21 nt, RNAi-antisense strand
cucaaugucauccgugguguu

SEQ ID NO: 19000 - DNA, 21 bp, Homo sapiens
tatactgataacgattctgtc

SEQ ID NO: 19001 - RNA, 21 nt, RNAi-sense strand
uacugauaacgauucugucuu

SEQ ID NO: 19002 - RNA, 21 nt, RNAi-antisense strand
gacagaaucguuaucaguauu

SEQ ID NO: 19003 - DNA, 21 bp, Homo sapiens
tactgataacgattctgtcgt

SEQ ID NO: 19004 - RNA, 21 nt, RNAi-sense strand
cugauaacgauucugucguuu

SEQ ID NO: 19005 - RNA, 21 nt, RNAi-antisense strand
acgacagaaucguuaucaguu

SEQ ID NO: 19006 - DNA, 21 bp, Homo sapiens
tacctgatctaaccgatgtga

SEQ ID NO: 19007 - RNA, 21 nt, RNAi-sense strand
ccugaucuaaccgaugugauu

SEQ ID NO: 19008 - RNA, 21 nt, RNAi-antisense strand
ucacaucgguuagaucagguu

SEQ ID NO: 19009 - DNA, 21 bp, Homo sapiens
aactggagcagtaccgcctgt

SEQ ID NO: 19010 - RNA, 21 nt, RNAi-sense strand
cuggagcaguaccgccuguuu

SEQ ID NO: 19011 - RNA, 21 nt, RNAi-antisense strand
acaggcgguacugcuccaguu

SEQ ID NO: 19012 - DNA, 21 bp, Homo sapiens
aagctgctatcaagtacagcg

SEQ ID NO: 19013 - RNA, 21 nt, RNAi-sense strand
gcugcuaucaaguacagcguu

SEQ ID NO: 19014 - RNA, 21 nt, RNAi-antisense strand
cgcuguacuugauagcagcuu

SEQ ID NO: 19015 - DNA, 21 bp, Homo sapiens
aatgagaccgatggccagatc

SEQ ID NO: 19016 - RNA, 21 nt, RNAi-sense strand
ugagaccgauggccagaucuu

SEQ ID NO: 19017 - RNA, 21 nt, RNAi-antisense strand
gaucuggccaucggucucauu

SEQ ID NO: 19018 - DNA, 21 bp, Homo sapiens
aacctggctttggcctattac

SEQ ID NO: 19019 - RNA, 21 nt, RNAi-sense strand
ccuggcuuuggccuauuacuu

SEQ ID NO: 19020 - RNA, 21 nt, RNAi-antisense strand
guaauaggccaaagccagguu

SEQ ID NO: 19021 - DNA, 21 bp, Homo sapiens
aagcatatcgctgagattatt

SEQ ID NO: 19022 - RNA, 21 nt, RNAi-sense strand
gcauaucgcugagauuauuuu

SEQ ID NO: 19023 - RNA, 21 nt, RNAi-antisense strand
aauaaucucagcgauaugcuu

SEQ ID NO: 19024 - DNA, 21 bp, Homo sapiens
aacaccttagtcctccatcag

SEQ ID NO: 19025 - RNA, 21 nt, RNAi-sense strand
caccuuaguccuccaucaguu

SEQ ID NO: 19026 - RNA, 21 nt, RNAi-antisense strand
cugauggaggacuaagguguu

SEQ ID NO: 19027 - DNA, 21 bp, Homo sapiens
aagccttcaaccttaaggcag

SEQ ID NO: 19028 - RNA, 21 nt, RNAi-sense strand
gccuucaaccuuaaggcaguu

SEQ ID NO: 19029 - RNA, 21 nt, RNAi-antisense strand
cugccuuaagguugaaggcuu

SEQ ID NO: 19030 - DNA, 21 bp, Homo sapiens
aaccttaaggcagctatagaa

SEQ ID NO: 19031 - RNA, 21 nt, RNAi-sense strand
ccuuaaggcagcuauagaauu

SEQ ID NO: 19032 - RNA, 21 nt, RNAi-antisense strand
uucuauagcugccuuaagguu

SEQ ID NO: 19033 - DNA, 21 bp, Homo sapiens
aaggcagctatagaataccaa

SEQ ID NO: 19034 - RNA, 21 nt, RNAi-sense strand
ggcagcuauagaauaccaauu

SEQ ID NO: 19035 - RNA, 21 nt, RNAi-antisense strand
uugguauucuauagcugccuu

SEQ ID NO: 19036 - DNA, 21 bp, Homo sapiens
aataccaactgagaaactatg

SEQ ID NO: 19037 - RNA, 21 nt, RNAi-sense strand
uaccaacugagaaacuauguu

SEQ ID NO: 19038 - RNA, 21 nt, RNAi-antisense strand
cauaguuucucaguugguauu

SEQ ID NO: 19039 - DNA, 21 bp, Homo sapiens
aactgagaaactatgaggcag

SEQ ID NO: 19040 - RNA, 21 nt, RNAi-sense strand
cugagaaacuaugaggcaguu

SEQ ID NO: 19041 - RNA, 21 nt, RNAi-antisense strand
cugccucauaguuucucaguu

SEQ ID NO: 19042 - DNA, 21 bp, Homo sapiens
aaactatgaggcagctcaaga

SEQ ID NO: 19043 - RNA, 21 nt, RNAi-sense strand
acuaugaggcagcucaagauu

SEQ ID NO: 19044 - RNA, 21 nt, RNAi-antisense strand
ucuugagcugccucauaguuu

SEQ ID NO: 19045 - DNA, 21 bp, Homo sapiens
aactatgaggcagctcaagaa

SEQ ID NO: 19046 - RNA, 21 nt, RNAi-sense strand
cuaugaggcagcucaagaauu

SEQ ID NO: 19047 - RNA, 21 nt, RNAi-antisense strand
uucuugagcugccucauaguu

SEQ ID NO: 19048 - DNA, 21 bp, Homo sapiens
aaccaggcactaatgaacatg

SEQ ID NO: 19049 - RNA, 21 nt, RNAi-sense strand
ccaggcacuaaugaacauguu

SEQ ID NO: 19050 - RNA, 21 nt, RNAi-antisense strand
cauguucauuagugccugguu

SEQ ID NO: 19051 - DNA, 21 bp, Homo sapiens
aatgaacatggatgccaggcc

SEQ ID NO: 19052 - RNA, 21 nt, RNAi-sense strand
ugaacauggaugccaggccuu

SEQ ID NO: 19053 - RNA, 21 nt, RNAi-antisense strand
ggccuggcauccauguucauu

SEQ ID NO: 19054 - DNA, 21 bp, Homo sapiens
aacatggatgccaggcctaca

SEQ ID NO: 19055 - RNA, 21 nt, RNAi-sense strand
cauggaugccaggccuacauu

SEQ ID NO: 19056 - RNA, 21 nt, RNAi-antisense strand
uguaggccuggcauccauguu

SEQ ID NO: 19057 - DNA, 21 bp, Homo sapiens
aacctgttgctgctctactgt

SEQ ID NO: 19058 - RNA, 21 nt, RNAi-sense strand
ccuguugcugcucuacuguuu

SEQ ID NO: 19059 - RNA, 21 nt, RNAi-antisense strand
acaguagagcagcaacagguu

SEQ ID NO: 19060 - DNA, 21 bp, Homo sapiens
aagaggctttcattaagcttg

SEQ ID NO: 19061 - RNA, 21 nt, RNAi-sense strand
gaggcuuucauuaagcuuguu

SEQ ID NO: 19062 - RNA, 21 nt, RNAi-antisense strand
caagcuuaaugaaagccucuu

SEQ ID NO: 19063 - DNA, 21 bp, Homo sapiens
aaacttaccatacaagtacag

SEQ ID NO: 19064 - RNA, 21 nt, RNAi-sense strand
acuuaccauacaaguacaguu

SEQ ID NO: 19065 - RNA, 21 nt, RNAi-antisense strand
cuguacuuguaugguaaguuu

SEQ ID NO: 19066 - DNA, 21 bp, Homo sapiens
aacttaccatacaagtacagg

SEQ ID NO: 19067 - RNA, 21 nt, RNAi-sense strand
cuuaccauacaaguacagguu

SEQ ID NO: 19068 - RNA, 21 nt, RNAi-antisense strand
ccuguacuuguaugguaaguu

SEQ ID NO: 19069 - DNA, 21 bp, Homo sapiens
aagtacaggaagcaagacaca

SEQ ID NO: 19070 - RNA, 21 nt, RNAi-sense strand
guacaggaagcaagacacauu

SEQ ID NO: 19071 - RNA, 21 nt, RNAi-antisense strand
ugugucuugcuuccuguacuu

SEQ ID NO: 19072 - DNA, 21 bp, Homo sapiens
aagcaagacacaatagagatg

SEQ ID NO: 19073 - RNA, 21 nt, RNAi-sense strand
gcaagacacaauagagauguu

SEQ ID NO: 19074 - RNA, 21 nt, RNAi-antisense strand
caucucuauugugucuugcuu

SEQ ID NO: 19075 - DNA, 21 bp, Homo sapiens
aagacacaatagagatgatga

SEQ ID NO: 19076 - RNA, 21 nt, RNAi-sense strand
gacacaauagagaugaugauu

SEQ ID NO: 19077 - RNA, 21 nt, RNAi-antisense strand
ucaucaucucuauugugucuu

SEQ ID NO: 19078 - DNA, 21 bp, Homo sapiens
aatagagatgatgaagctatc

SEQ ID NO: 19079 - RNA, 21 nt, RNAi-sense strand
uagagaugaugaagcuaucuu

SEQ ID NO: 19080 - RNA, 21 nt, RNAi-antisense strand
gauagcuucaucaucucuauu

SEQ ID NO: 19081 - DNA, 21 bp, Homo sapiens
aaaggcagtgaatgaatatga

SEQ ID NO: 19082 - RNA, 21 nt, RNAi-sense strand
aggcagugaaugaauaugauu

SEQ ID NO: 19083 - RNA, 21 nt, RNAi-antisense strand
ucauauucauucacugccuuu

SEQ ID NO: 19084 - DNA, 21 bp, Homo sapiens
aaggcagtgaatgaatatgat

SEQ ID NO: 19085 - RNA, 21 nt, RNAi-sense strand
ggcagugaaugaauaugauuu

SEQ ID NO: 19086 - RNA, 21 nt, RNAi-antisense strand
aucauauucauucacugccuu

SEQ ID NO: 19087 - DNA, 21 bp, Homo sapiens
aatatgatgaaaccatggaga

SEQ ID NO: 19088 - RNA, 21 nt, RNAi-sense strand
uaugaugaaaccauggagauu

SEQ ID NO: 19089 - RNA, 21 nt, RNAi-antisense strand
ucuccaugguuucaucauauu

SEQ ID NO: 19090 - DNA, 21 bp, Homo sapiens
aaaccatggagaaatacattc

SEQ ID NO: 19091 - RNA, 21 nt, RNAi-sense strand
accauggagaaauacauucuu

SEQ ID NO: 19092 - RNA, 21 nt, RNAi-antisense strand
gaauguauuucuccaugguuu

SEQ ID NO: 19093 - DNA, 21 bp, Homo sapiens
aaccatggagaaatacattcc

SEQ ID NO: 19094 - RNA, 21 nt, RNAi-sense strand
ccauggagaaauacauuccuu

SEQ ID NO: 19095 - RNA, 21 nt, RNAi-antisense strand
ggaauguauuucuccaugguu

SEQ ID NO: 19096 - DNA, 21 bp, Homo sapiens
aaatacattcctgtgttgatg

SEQ ID NO: 19097 - RNA, 21 nt, RNAi-sense strand
auacauuccuguguugauguu

SEQ ID NO: 19098 - RNA, 21 nt, RNAi-antisense strand
caucaacacaggaauguauuu

SEQ ID NO: 19099 - DNA, 21 bp, Homo sapiens
aatacattcctgtgttgatgg

SEQ ID NO: 19100 - RNA, 21 nt, RNAi-sense strand
uacauuccuguguugaugguu

SEQ ID NO: 19101 - RNA, 21 nt, RNAi-antisense strand
ccaucaacacaggaauguauu

SEQ ID NO: 19102 - DNA, 21 bp, Homo sapiens
aaagatcttccgcaaatctgt

SEQ ID NO: 19103 - RNA, 21 nt, RNAi-sense strand
agaucuuccgcaaaucuguuu

SEQ ID NO: 19104 - RNA, 21 nt, RNAi-antisense strand
acagauuugcggaagaucuuu

SEQ ID NO: 19105 - DNA, 21 bp, Homo sapiens
aagatcttccgcaaatctgtg

SEQ ID NO: 19106 - RNA, 21 nt, RNAi-sense strand
gaucuuccgcaaaucuguguu

SEQ ID NO: 19107 - RNA, 21 nt, RNAi-antisense strand
cacagauuugcggaagaucuu

SEQ ID NO: 19108 - DNA, 21 bp, Homo sapiens
aaatctgtggaattctgtaac

SEQ ID NO: 19109 - RNA, 21 nt, RNAi-sense strand
aucuguggaauucuguaacuu

SEQ ID NO: 19110 - RNA, 21 nt, RNAi-antisense strand
guuacagaauuccacagauuu

SEQ ID NO: 19111 - DNA, 21 bp, Homo sapiens
aatctgtggaattctgtaacg

SEQ ID NO: 19112 - RNA, 21 nt, RNAi-sense strand
ucuguggaauucuguaacguu

SEQ ID NO: 19113 - RNA, 21 nt, RNAi-antisense strand
cguuacagaauuccacagauu

SEQ ID NO: 19114 - DNA, 21 bp, Homo sapiens
aattctgtaacgaccatgatg

SEQ ID NO: 19115 - RNA, 21 nt, RNAi-sense strand
uucuguaacgaccaugauguu

SEQ ID NO: 19116 - RNA, 21 nt, RNAi-antisense strand
caucauggucguuacagaauu

SEQ ID NO: 19117 - DNA, 21 bp, Homo sapiens
aacgaccatgatgtgtggaag

SEQ ID NO: 19118 - RNA, 21 nt, RNAi-sense strand
cgaccaugauguguggaaguu

SEQ ID NO: 19119 - RNA, 21 nt, RNAi-antisense strand
cuuccacacaucauggucguu

SEQ ID NO: 19120 - DNA, 21 bp, Homo sapiens
aagttgaatgtggctcatgtt

SEQ ID NO: 19121 - RNA, 21 nt, RNAi-sense strand
guugaauguggcucauguuuu

SEQ ID NO: 19122 - RNA, 21 nt, RNAi-antisense strand
aacaugagccacauucaacuu

SEQ ID NO: 19123 - DNA, 21 bp, Homo sapiens
aatgtggctcatgttctgttc

SEQ ID NO: 19124 - RNA, 21 nt, RNAi-sense strand
uguggcucauguucuguucuu

SEQ ID NO: 19125 - RNA, 21 nt, RNAi-antisense strand
gaacagaacaugagccacauu

SEQ ID NO: 19126 - DNA, 21 bp, Homo sapiens
aaatacaaagaagccattggt

SEQ ID NO: 19127 - RNA, 21 nt, RNAi-sense strand
auacaaagaagccauugguuu

SEQ ID NO: 19128 - RNA, 21 nt, RNAi-antisense strand
accaauggcuucuuuguauuu

SEQ ID NO: 19129 - DNA, 21 bp, Homo sapiens
aatacaaagaagccattggtt

SEQ ID NO: 19130 - RNA, 21 nt, RNAi-sense strand
uacaaagaagccauugguuuu

SEQ ID NO: 19131 - RNA, 21 nt, RNAi-antisense strand
aaccaauggcuucuuuguauu

SEQ ID NO: 19132 - DNA, 21 bp, Homo sapiens
aaagaagccattggtttctat

SEQ ID NO: 19133 - RNA, 21 nt, RNAi-sense strand
agaagccauugguuucuauuu

SEQ ID NO: 19134 - RNA, 21 nt, RNAi-antisense strand
auagaaaccaauggcuucuuu

SEQ ID NO: 19135 - DNA, 21 bp, Homo sapiens
aagaagccattggtttctatg

SEQ ID NO: 19136 - RNA, 21 nt, RNAi-sense strand
gaagccauugguuucuauguu

SEQ ID NO: 19137 - RNA, 21 nt, RNAi-antisense strand
cauagaaaccaauggcuucuu

SEQ ID NO: 19138 - DNA, 21 bp, Homo sapiens
aagccattggtttctatgaac

SEQ ID NO: 19139 - RNA, 21 nt, RNAi-sense strand
gccauugguuucuaugaacuu

SEQ ID NO: 19140 - RNA, 21 nt, RNAi-antisense strand
guucauagaaaccaauggcuu

SEQ ID NO: 19141 - DNA, 21 bp, Homo sapiens
aagcattatgataacatcctg

SEQ ID NO: 19142 - RNA, 21 nt, RNAi-sense strand
gcauuaugauaacauccuguu

SEQ ID NO: 19143 - RNA, 21 nt, RNAi-antisense strand
caggauguuaucauaaugcuu

SEQ ID NO: 19144 - DNA, 21 bp, Homo sapiens
aacatcctgaatgtcagtgct

SEQ ID NO: 19145 - RNA, 21 nt, RNAi-sense strand
cauccugaaugucagugcuuu

SEQ ID NO: 19146 - RNA, 21 nt, RNAi-antisense strand
agcacugacauucaggauguu

SEQ ID NO: 19147 - DNA, 21 bp, Homo sapiens
aatgtcagtgctattgtactg

SEQ ID NO: 19148 - RNA, 21 nt, RNAi-sense strand
ugucagugcuauuguacuguu

SEQ ID NO: 19149 - RNA, 21 nt, RNAi-antisense strand
caguacaauagcacugacauu

SEQ ID NO: 19150 - DNA, 21 bp, Homo sapiens
aaatgaagaagcagaggagtt

SEQ ID NO: 19151 - RNA, 21 nt, RNAi-sense strand
augaagaagcagaggaguuuu

SEQ ID NO: 19152 - RNA, 21 nt, RNAi-antisense strand
aacuccucugcuucuucauuu

SEQ ID NO: 19153 - DNA, 21 bp, Homo sapiens
aatgaagaagcagaggagttg

SEQ ID NO: 19154 - RNA, 21 nt, RNAi-sense strand
ugaagaagcagaggaguuguu

SEQ ID NO: 19155 - RNA, 21 nt, RNAi-antisense strand
caacuccucugcuucuucauu

SEQ ID NO: 19156 - DNA, 21 bp, Homo sapiens
aagaagcagaggagttgatga

SEQ ID NO: 19157 - RNA, 21 nt, RNAi-sense strand
gaagcagaggaguugaugauu

SEQ ID NO: 19158 - RNA, 21 nt, RNAi-antisense strand
ucaucaacuccucugcuucuu

SEQ ID NO: 19159 - DNA, 21 bp, Homo sapiens
aagcagaggagttgatgagga

SEQ ID NO: 19160 - RNA, 21 nt, RNAi-sense strand
gcagaggaguugaugaggauu

SEQ ID NO: 19161 - RNA, 21 nt, RNAi-antisense strand
uccucaucaacuccucugcuu

SEQ ID NO: 19162 - DNA, 21 bp, Homo sapiens
aaaggaggaagagcagctctc

SEQ ID NO: 19163 - RNA, 21 nt, RNAi-sense strand
aggaggaagagcagcucucuu

SEQ ID NO: 19164 - RNA, 21 nt, RNAi-antisense strand
gagagcugcucuuccuccuuu

SEQ ID NO: 19165 - DNA, 21 bp, Homo sapiens
aaggaggaagagcagctctct

SEQ ID NO: 19166 - RNA, 21 nt, RNAi-sense strand
ggaggaagagcagcucucuuu

SEQ ID NO: 19167 - RNA, 21 nt, RNAi-antisense strand
agagagcugcucuuccuccuu

SEQ ID NO: 19168 - DNA, 21 bp, Homo sapiens
aagagcagctctcttatgatg

SEQ ID NO: 19169 - RNA, 21 nt, RNAi-sense strand
gagcagcucucuuaugauguu

SEQ ID NO: 19170 - RNA, 21 nt, RNAi-antisense strand
caucauaagagagcugcucuu

SEQ ID NO: 19171 - DNA, 21 bp, Homo sapiens
aaatgtaccatctctgcattg

SEQ ID NO: 19172 - RNA, 21 nt, RNAi-sense strand
auguaccaucucugcauuguu

SEQ ID NO: 19173 - RNA, 21 nt, RNAi-antisense strand
caaugcagagaugguacauuu

SEQ ID NO: 19174 - DNA, 21 bp, Homo sapiens
aatgtaccatctctgcattgt

SEQ ID NO: 19175 - RNA, 21 nt, RNAi-sense strand
uguaccaucucugcauuguuu

SEQ ID NO: 19176 - RNA, 21 nt, RNAi-antisense strand
acaaugcagagaugguacauu

SEQ ID NO: 19177 - DNA, 21 bp, Homo sapiens
aatttggtgataggaactctt

SEQ ID NO: 19178 - RNA, 21 nt, RNAi-sense strand
uuuggugauaggaacucuuuu

SEQ ID NO: 19179 - RNA, 21 nt, RNAi-antisense strand
aagaguuccuaucaccaaauu

SEQ ID NO: 19180 - DNA, 21 bp, Homo sapiens
aactctttattgtgccaaagg

SEQ ID NO: 19181 - RNA, 21 nt, RNAi-sense strand
cucuuuauugugccaaagguu

SEQ ID NO: 19182 - RNA, 21 nt, RNAi-antisense strand
ccuuuggcacaauaaagaguu

SEQ ID NO: 19183 - DNA, 21 bp, Homo sapiens
aaagcttggaaccttacaaca

SEQ ID NO: 19184 - RNA, 21 nt, RNAi-sense strand
agcuuggaaccuuacaacauu

SEQ ID NO: 19185 - RNA, 21 nt, RNAi-antisense strand
uguuguaagguuccaagcuuu

SEQ ID NO: 19186 - DNA, 21 bp, Homo sapiens
aagcttggaaccttacaacaa

SEQ ID NO: 19187 - RNA, 21 nt, RNAi-sense strand
gcuuggaaccuuacaacaauu

SEQ ID NO: 19188 - RNA, 21 nt, RNAi-antisense strand
uuguuguaagguuccaagcuu

SEQ ID NO: 19189 - DNA, 21 bp, Homo sapiens
aacagacacctggtattatgc

SEQ ID NO: 19190 - RNA, 21 nt, RNAi-sense strand
cagacaccugguauuaugcuu

SEQ ID NO: 19191 - RNA, 21 nt, RNAi-antisense strand
gcauaauaccaggugucuguu

SEQ ID NO: 19192 - DNA, 21 bp, Homo sapiens
aaagatgcttcctgtccttgt

SEQ ID NO: 19193 - RNA, 21 nt, RNAi-sense strand
agaugcuuccuguccuuguuu

SEQ ID NO: 19194 - RNA, 21 nt, RNAi-antisense strand
acaaggacaggaagcaucuuu

SEQ ID NO: 19195 - DNA, 21 bp, Homo sapiens
aagatgcttcctgtccttgtt

SEQ ID NO: 19196 - RNA, 21 nt, RNAi-sense strand
gaugcuuccuguccuuguuuu

SEQ ID NO: 19197 - RNA, 21 nt, RNAi-antisense strand
aacaaggacaggaagcaucuu

SEQ ID NO: 19198 - DNA, 21 bp, Homo sapiens
aaacacacaatcatgcttcgt

SEQ ID NO: 19199 - RNA, 21 nt, RNAi-sense strand
acacacaaucaugcuucguuu

SEQ ID NO: 19200 - RNA, 21 nt, RNAi-antisense strand
acgaagcaugauuguguguuu

SEQ ID NO: 19201 - DNA, 21 bp, Homo sapiens
aacacacaatcatgcttcgtg

SEQ ID NO: 19202 - RNA, 21 nt, RNAi-sense strand
cacacaaucaugcuucguguu

SEQ ID NO: 19203 - RNA, 21 nt, RNAi-antisense strand
cacgaagcaugauuguguguu

SEQ ID NO: 19204 - DNA, 21 bp, Homo sapiens
aatcatgcttcgtgatagtgt

SEQ ID NO: 19205 - RNA, 21 nt, RNAi-sense strand
ucaugcuucgugauaguguuu

SEQ ID NO: 19206 - RNA, 21 nt, RNAi-antisense strand
acacuaucacgaagcaugauu

SEQ ID NO: 19207 - DNA, 21 bp, Homo sapiens
aagaatgtgtccagtttctag

SEQ ID NO: 19208 - RNA, 21 nt, RNAi-sense strand
gaauguguccaguuucuaguu

SEQ ID NO: 19209 - RNA, 21 nt, RNAi-antisense strand
cuagaaacuggacacauucuu

SEQ ID NO: 19210 - DNA, 21 bp, Homo sapiens
aatgtgtccagtttctagaac

SEQ ID NO: 19211 - RNA, 21 nt, RNAi-sense strand
uguguccaguuucuagaacuu

SEQ ID NO: 19212 - RNA, 21 nt, RNAi-antisense strand
guucuagaaacuggacacauu

SEQ ID NO: 19213 - DNA, 21 bp, Homo sapiens
aacactgtgaacttcatggca

SEQ ID NO: 19214 - RNA, 21 nt, RNAi-sense strand
cacugugaacuucauggcauu

SEQ ID NO: 19215 - RNA, 21 nt, RNAi-antisense strand
ugccaugaaguucacaguguu

SEQ ID NO: 19216 - DNA, 21 bp, Homo sapiens
aacttcatggcagaaacatac

SEQ ID NO: 19217 - RNA, 21 nt, RNAi-sense strand
cuucauggcagaaacauacuu

SEQ ID NO: 19218 - RNA, 21 nt, RNAi-antisense strand
guauguuucugccaugaaguu

SEQ ID NO: 19219 - DNA, 21 bp, Homo sapiens
aaacatacctgctgttattga

SEQ ID NO: 19220 - RNA, 21 nt, RNAi-sense strand
acauaccugcuguuauugauu

SEQ ID NO: 19221 - RNA, 21 nt, RNAi-antisense strand
ucaauaacagcagguauguuu

SEQ ID NO: 19222 - DNA, 21 bp, Homo sapiens
aacatacctgctgttattgaa

SEQ ID NO: 19223 - RNA, 21 nt, RNAi-sense strand
cauaccugcuguuauugaauu

SEQ ID NO: 19224 - RNA, 21 nt, RNAi-antisense strand
uucaauaacagcagguauguu

SEQ ID NO: 19225 - DNA, 21 bp, Homo sapiens
aagaagaaagaatgcatgttg

SEQ ID NO: 19226 - RNA, 21 nt, RNAi-sense strand
gaagaaagaaugcauguuguu

SEQ ID NO: 19227 - RNA, 21 nt, RNAi-antisense strand
caacaugcauucuuucuucuu

SEQ ID NO: 19228 - DNA, 21 bp, Homo sapiens
aagaaagaatgcatgttggaa

SEQ ID NO: 19229 - RNA, 21 nt, RNAi-sense strand
gaaagaaugcauguuggaauu

SEQ ID NO: 19230 - RNA, 21 nt, RNAi-antisense strand
uuccaacaugcauucuuucuu

SEQ ID NO: 19231 - DNA, 21 bp, Homo sapiens
aaagaatgcatgttggaaaga

SEQ ID NO: 19232 - RNA, 21 nt, RNAi-sense strand
agaaugcauguuggaaagauu

SEQ ID NO: 19233 - RNA, 21 nt, RNAi-antisense strand
ucuuuccaacaugcauucuuu

SEQ ID NO: 19234 - DNA, 21 bp, Homo sapiens
aagaatgcatgttggaaagaa

SEQ ID NO: 19235 - RNA, 21 nt, RNAi-sense strand
gaaugcauguuggaaagaauu

SEQ ID NO: 19236 - RNA, 21 nt, RNAi-antisense strand
uucuuuccaacaugcauucuu

SEQ ID NO: 19237 - DNA, 21 bp, Homo sapiens
aatgcatgttggaaagaatac

SEQ ID NO: 19238 - RNA, 21 nt, RNAi-sense strand
ugcauguuggaaagaauacuu

SEQ ID NO: 19239 - RNA, 21 nt, RNAi-antisense strand
guauucuuuccaacaugcauu

SEQ ID NO: 19240 - DNA, 21 bp, Homo sapiens
aagaatacagtcacatatgag

SEQ ID NO: 19241 - RNA, 21 nt, RNAi-sense strand
gaauacagucacauaugaguu

SEQ ID NO: 19242 - RNA, 21 nt, RNAi-antisense strand
cucauaugugacuguauucuu

SEQ ID NO: 19243 - DNA, 21 bp, Homo sapiens
aatacagtcacatatgagtct

SEQ ID NO: 19244 - RNA, 21 nt, RNAi-sense strand
uacagucacauaugagucuuu

SEQ ID NO: 19245 - RNA, 21 nt, RNAi-antisense strand
agacucauaugugacuguauu

SEQ ID NO: 19246 - DNA, 21 bp, Homo sapiens
aatagctgatagtggcattta

SEQ ID NO: 19247 - RNA, 21 nt, RNAi-sense strand
uagcugauaguggcauuuauu

SEQ ID NO: 19248 - RNA, 21 nt, RNAi-antisense strand
uaaaugccacuaucagcuauu

SEQ ID NO: 19249 - DNA, 21 bp, Homo sapiens
catccgcaatgcacgctacgc

SEQ ID NO: 19250 - RNA, 21 nt, RNAi-sense strand
uccgcaaugcacgcuacgcuu

SEQ ID NO: 19251 - RNA, 21 nt, RNAi-antisense strand
gcguagcgugcauugcggauu

SEQ ID NO: 19252 - DNA, 21 bp, Homo sapiens
cacctgcaagctgctatcaag

SEQ ID NO: 19253 - RNA, 21 nt, RNAi-sense strand
ccugcaagcugcuaucaaguu

SEQ ID NO: 19254 - RNA, 21 nt, RNAi-antisense strand
cuugauagcagcuugcagguu

SEQ ID NO: 19255 - DNA, 21 bp, Homo sapiens
caagctgctatcaagtacagc

SEQ ID NO: 19256 - RNA, 21 nt, RNAi-sense strand
agcugcuaucaaguacagcuu

SEQ ID NO: 19257 - RNA, 21 nt, RNAi-antisense strand
gcuguacuugauagcagcuuu

SEQ ID NO: 19258 - DNA, 21 bp, Homo sapiens
caggagcctggtagagcagct

SEQ ID NO: 19259 - RNA, 21 nt, RNAi-sense strand
ggagccugguagagcagcuuu

SEQ ID NO: 19260 - RNA, 21 nt, RNAi-antisense strand
agcugcucuaccaggcuccuu

SEQ ID NO: 19261 - DNA, 21 bp, Homo sapiens
caacctggctttggcctatta

SEQ ID NO: 19262 - RNA, 21 nt, RNAi-sense strand
accuggcuuuggccuauuauu

SEQ ID NO: 19263 - RNA, 21 nt, RNAi-antisense strand
uaauaggccaaagccagguuu

SEQ ID NO: 19264 - DNA, 21 bp, Homo sapiens
cagcagccgacagtatgcttc

SEQ ID NO: 19265 - RNA, 21 nt, RNAi-sense strand
gcagccgacaguaugcuucuu

SEQ ID NO: 19266 - RNA, 21 nt, RNAi-antisense strand
gaagcauacugucggcugcuu

SEQ ID NO: 19267 - DNA, 21 bp, Homo sapiens
cagccgacagtatgcttcagc

SEQ ID NO: 19268 - RNA, 21 nt, RNAi-sense strand
gccgacaguaugcuucagcuu

SEQ ID NO: 19269 - RNA, 21 nt, RNAi-antisense strand
gcugaagcauacugucggcuu

SEQ ID NO: 19270 - DNA, 21 bp, Homo sapiens
cagtatgcttcagcactgaag

SEQ ID NO: 19271 - RNA, 21 nt, RNAi-sense strand
guaugcuucagcacugaaguu

SEQ ID NO: 19272 - RNA, 21 nt, RNAi-antisense strand
cuucagugcugaagcauacuu

SEQ ID NO: 19273 - DNA, 21 bp, Homo sapiens
cagcactgaagcatatcgctg

SEQ ID NO: 19274 - RNA, 21 nt, RNAi-sense strand
gcacugaagcauaucgcuguu

SEQ ID NO: 19275 - RNA, 21 nt, RNAi-antisense strand
cagcgauaugcuucagugcuu

SEQ ID NO: 19276 - DNA, 21 bp, Homo sapiens
cactgaagcatatcgctgaga

SEQ ID NO: 19277 - RNA, 21 nt, RNAi-sense strand
cugaagcauaucgcugagauu

SEQ ID NO: 19278 - RNA, 21 nt, RNAi-antisense strand
ucucagcgauaugcuucaguu

SEQ ID NO: 19279 - DNA, 21 bp, Homo sapiens
catatcgctgagattattgag

SEQ ID NO: 19280 - RNA, 21 nt, RNAi-sense strand
uaucgcugagauuauugaguu

SEQ ID NO: 19281 - RNA, 21 nt, RNAi-antisense strand
cucaauaaucucagcgauauu

SEQ ID NO: 19282 - DNA, 21 bp, Homo sapiens
cattgatgttcgcagtgttgg

SEQ ID NO: 19283 - RNA, 21 nt, RNAi-sense strand
uugauguucgcaguguugguu

SEQ ID NO: 19284 - RNA, 21 nt, RNAi-antisense strand
ccaacacugcgaacaucaauu

SEQ ID NO: 19285 - DNA, 21 bp, Homo sapiens
cagtgttggcaacaccttagt

SEQ ID NO: 19286 - RNA, 21 nt, RNAi-sense strand
guguuggcaacaccuuaguuu

SEQ ID NO: 19287 - RNA, 21 nt, RNAi-antisense strand
acuaagguguugccaacacuu

SEQ ID NO: 19288 - DNA, 21 bp, Homo sapiens
caacaccttagtcctccatca

SEQ ID NO: 19289 - RNA, 21 nt, RNAi-sense strand
acaccuuaguccuccaucauu

SEQ ID NO: 19290 - RNA, 21 nt, RNAi-antisense strand
ugauggaggacuaagguguuu

SEQ ID NO: 19291 - DNA, 21 bp, Homo sapiens
caccttagtcctccatcagac

SEQ ID NO: 19292 - RNA, 21 nt, RNAi-sense strand
ccuuaguccuccaucagacuu

SEQ ID NO: 19293 - RNA, 21 nt, RNAi-antisense strand
gucugauggaggacuaagguu

SEQ ID NO: 19294 - DNA, 21 bp, Homo sapiens
catcagactgctctggtggaa

SEQ ID NO: 19295 - RNA, 21 nt, RNAi-sense strand
ucagacugcucugguggaauu

SEQ ID NO: 19296 - RNA, 21 nt, RNAi-antisense strand
uuccaccagagcagucugauu

SEQ ID NO: 19297 - DNA, 21 bp, Homo sapiens
cagactgctctggtggaagcc

SEQ ID NO: 19298 - RNA, 21 nt, RNAi-sense strand
gacugcucugguggaagccuu

SEQ ID NO: 19299 - RNA, 21 nt, RNAi-antisense strand
ggcuuccaccagagcagucuu

SEQ ID NO: 19300 - DNA, 21 bp, Homo sapiens
caaccttaaggcagctataga

SEQ ID NO: 19301 - RNA, 21 nt, RNAi-sense strand
accuuaaggcagcuauagauu

SEQ ID NO: 19302 - RNA, 21 nt, RNAi-antisense strand
ucuauagcugccuuaagguuu

SEQ ID NO: 19303 - DNA, 21 bp, Homo sapiens
cagctatagaataccaactga

SEQ ID NO: 19304 - RNA, 21 nt, RNAi-sense strand
gcuauagaauaccaacugauu

SEQ ID NO: 19305 - RNA, 21 nt, RNAi-antisense strand
ucaguugguauucuauagcuu

SEQ ID NO: 19306 - DNA, 21 bp, Homo sapiens
caactgagaaactatgaggca

SEQ ID NO: 19307 - RNA, 21 nt, RNAi-sense strand
acugagaaacuaugaggcauu

SEQ ID NO: 19308 - RNA, 21 nt, RNAi-antisense strand
ugccucauaguuucucaguuu

SEQ ID NO: 19309 - DNA, 21 bp, Homo sapiens
cacaaccaggcactaatgaac

SEQ ID NO: 19310 - RNA, 21 nt, RNAi-sense strand
caaccaggcacuaaugaacuu

SEQ ID NO: 19311 - RNA, 21 nt, RNAi-antisense strand
guucauuagugccugguuguu

SEQ ID NO: 19312 - DNA, 21 bp, Homo sapiens
caaccaggcactaatgaacat

SEQ ID NO: 19313 - RNA, 21 nt, RNAi-sense strand
accaggcacuaaugaacauuu

SEQ ID NO: 19314 - RNA, 21 nt, RNAi-antisense strand
auguucauuagugccugguuu

SEQ ID NO: 19315 - DNA, 21 bp, Homo sapiens
caggcactaatgaacatggat

SEQ ID NO: 19316 - RNA, 21 nt, RNAi-sense strand
ggcacuaaugaacauggauuu

SEQ ID NO: 19317 - RNA, 21 nt, RNAi-antisense strand
auccauguucauuagugccuu

SEQ ID NO: 19318 - DNA, 21 bp, Homo sapiens
cactaatgaacatggatgcca

SEQ ID NO: 19319 - RNA, 21 nt, RNAi-sense strand
cuaaugaacauggaugccauu

SEQ ID NO: 19320 - RNA, 21 nt, RNAi-antisense strand
uggcauccauguucauuaguu

SEQ ID NO: 19321 - DNA, 21 bp, Homo sapiens
catggatgccaggcctacaga

SEQ ID NO: 19322 - RNA, 21 nt, RNAi-sense strand
uggaugccaggccuacagauu

SEQ ID NO: 19323 - RNA, 21 nt, RNAi-antisense strand
ucuguaggccuggcauccauu

SEQ ID NO: 19324 - DNA, 21 bp, Homo sapiens
caacctgttgctgctctactg

SEQ ID NO: 19325 - RNA, 21 nt, RNAi-sense strand
accuguugcugcucuacuguu

SEQ ID NO: 19326 - RNA, 21 nt, RNAi-antisense strand
caguagagcagcaacagguuu

SEQ ID NO: 19327 - DNA, 21 bp, Homo sapiens
cagcagatgtcctggcagaaa

SEQ ID NO: 19328 - RNA, 21 nt, RNAi-sense strand
gcagauguccuggcagaaauu

SEQ ID NO: 19329 - RNA, 21 nt, RNAi-antisense strand
uuucugccaggacaucugcuu

SEQ ID NO: 19330 - DNA, 21 bp, Homo sapiens
cacttgccagacagctcctga

SEQ ID NO: 19331 - RNA, 21 nt, RNAi-sense strand
cuugccagacagcuccugauu

SEQ ID NO: 19332 - RNA, 21 nt, RNAi-antisense strand
ucaggagcugucuggcaaguu

SEQ ID NO: 19333 - DNA, 21 bp, Homo sapiens
cagacagctcctgaagaggct

SEQ ID NO: 19334 - RNA, 21 nt, RNAi-sense strand
gacagcuccugaagaggcuuu

SEQ ID NO: 19335 - RNA, 21 nt, RNAi-antisense strand
agccucuucaggagcugucuu

SEQ ID NO: 19336 - DNA, 21 bp, Homo sapiens
cagctcctgaagaggctttca

SEQ ID NO: 19337 - RNA, 21 nt, RNAi-sense strand
gcuccugaagaggcuuucauu

SEQ ID NO: 19338 - RNA, 21 nt, RNAi-antisense strand
ugaaagccucuucaggagcuu

SEQ ID NO: 19339 - DNA, 21 bp, Homo sapiens
catacaagtacaggaagcaag

SEQ ID NO: 19340 - RNA, 21 nt, RNAi-sense strand
uacaaguacaggaagcaaguu

SEQ ID NO: 19341 - RNA, 21 nt, RNAi-antisense strand
cuugcuuccuguacuuguauu

SEQ ID NO: 19342 - DNA, 21 bp, Homo sapiens
caagtacaggaagcaagacac

SEQ ID NO: 19343 - RNA, 21 nt, RNAi-sense strand
aguacaggaagcaagacacuu

SEQ ID NO: 19344 - RNA, 21 nt, RNAi-antisense strand
gugucuugcuuccuguacuuu

SEQ ID NO: 19345 - DNA, 21 bp, Homo sapiens
caggaagcaagacacaataga

SEQ ID NO: 19346 - RNA, 21 nt, RNAi-sense strand
ggaagcaagacacaauagauu

SEQ ID NO: 19347 - RNA, 21 nt, RNAi-antisense strand
ucuauugugucuugcuuccuu

SEQ ID NO: 19348 - DNA, 21 bp, Homo sapiens
caagacacaatagagatgatg

SEQ ID NO: 19349 - RNA, 21 nt, RNAi-sense strand
agacacaauagagaugauguu

SEQ ID NO: 19350 - RNA, 21 nt, RNAi-antisense strand
caucaucucuauugugucuuu

SEQ ID NO: 19351 - DNA, 21 bp, Homo sapiens
cacaatagagatgatgaagct

SEQ ID NO: 19352 - RNA, 21 nt, RNAi-sense strand
caauagagaugaugaagcuuu

SEQ ID NO: 19353 - RNA, 21 nt, RNAi-antisense strand
agcuucaucaucucuauuguu

SEQ ID NO: 19354 - DNA, 21 bp, Homo sapiens
caatagagatgatgaagctat

SEQ ID NO: 19355 - RNA, 21 nt, RNAi-sense strand
auagagaugaugaagcuauuu

SEQ ID NO: 19356 - RNA, 21 nt, RNAi-antisense strand
auagcuucaucaucucuauuu

SEQ ID NO: 19357 - DNA, 21 bp, Homo sapiens
catggagaaatacattcctgt

SEQ ID NO: 19358 - RNA, 21 nt, RNAi-sense strand
uggagaaauacauuccuguuu

SEQ ID NO: 19359 - RNA, 21 nt, RNAi-antisense strand
acaggaauguauuucuccauu

SEQ ID NO: 19360 - DNA, 21 bp, Homo sapiens
cattcctgtgttgatggctca

SEQ ID NO: 19361 - RNA, 21 nt, RNAi-sense strand
uuccuguguugauggcucauu

SEQ ID NO: 19362 - RNA, 21 nt, RNAi-antisense strand
ugagccaucaacacaggaauu

SEQ ID NO: 19363 - DNA, 21 bp, Homo sapiens
caaatctgtggaattctgtaa

SEQ ID NO: 19364 - RNA, 21 nt, RNAi-sense strand
aaucuguggaauucuguaauu

SEQ ID NO: 19365 - RNA, 21 nt, RNAi-antisense strand
uuacagaauuccacagauuuu

SEQ ID NO: 19366 - DNA, 21 bp, Homo sapiens
catgatgtgtggaagttgaat

SEQ ID NO: 19367 - RNA, 21 nt, RNAi-sense strand
ugauguguggaaguugaauuu

SEQ ID NO: 19368 - RNA, 21 nt, RNAi-antisense strand
auucaacuuccacacaucauu

SEQ ID NO: 19369 - DNA, 21 bp, Homo sapiens
catgttctgttcatgcaggaa

SEQ ID NO: 19370 - RNA, 21 nt, RNAi-sense strand
uguucuguucaugcaggaauu

SEQ ID NO: 19371 - RNA, 21 nt, RNAi-antisense strand
uuccugcaugaacagaacauu

SEQ ID NO: 19372 - DNA, 21 bp, Homo sapiens
caaatacaaagaagccattgg

SEQ ID NO: 19373 - RNA, 21 nt, RNAi-sense strand
aauacaaagaagccauugguu

SEQ ID NO: 19374 - RNA, 21 nt, RNAi-antisense strand
ccaauggcuucuuuguauuuu

SEQ ID NO: 19375 - DNA, 21 bp, Homo sapiens
caaagaagccattggtttcta

SEQ ID NO: 19376 - RNA, 21 nt, RNAi-sense strand
aagaagccauugguuucuauu

SEQ ID NO: 19377 - RNA, 21 nt, RNAi-antisense strand
uagaaaccaauggcuucuuuu

SEQ ID NO: 19378 - DNA, 21 bp, Homo sapiens
catagtcaagaagcattatga

SEQ ID NO: 19379 - RNA, 21 nt, RNAi-sense strand
uagucaagaagcauuaugauu

SEQ ID NO: 19380 - RNA, 21 nt, RNAi-antisense strand
ucauaaugcuucuugacuauu

SEQ ID NO: 19381 - DNA, 21 bp, Homo sapiens
catcctgaatgtcagtgctat

SEQ ID NO: 19382 - RNA, 21 nt, RNAi-sense strand
uccugaaugucagugcuauuu

SEQ ID NO: 19383 - RNA, 21 nt, RNAi-antisense strand
auagcacugacauucaggauu

SEQ ID NO: 19384 - DNA, 21 bp, Homo sapiens
cagtgctattgtactggctaa

SEQ ID NO: 19385 - RNA, 21 nt, RNAi-sense strand
gugcuauuguacuggcuaauu

SEQ ID NO: 19386 - RNA, 21 nt, RNAi-antisense strand
uuagccaguacaauagcacuu

SEQ ID NO: 19387 - DNA, 21 bp, Homo sapiens
cagaggagttgatgaggaaga

SEQ ID NO: 19388 - RNA, 21 nt, RNAi-sense strand
gaggaguugaugaggaagauu

SEQ ID NO: 19389 - RNA, 21 nt, RNAi-antisense strand
ucuuccucaucaacuccucuu

SEQ ID NO: 19390 - DNA, 21 bp, Homo sapiens
catctctgcattgtgaatttg

SEQ ID NO: 19391 - RNA, 21 nt, RNAi-sense strand
ucucugcauugugaauuuguu

SEQ ID NO: 19392 - RNA, 21 nt, RNAi-antisense strand
caaauucacaaugcagagauu

SEQ ID NO: 19393 - DNA, 21 bp, Homo sapiens
cattgtgaatttggtgatagg

SEQ ID NO: 19394 - RNA, 21 nt, RNAi-sense strand
uugugaauuuggugauagguu

SEQ ID NO: 19395 - RNA, 21 nt, RNAi-antisense strand
ccuaucaccaaauucacaauu

SEQ ID NO: 19396 - DNA, 21 bp, Homo sapiens
caaaggaaattatgactttgg

SEQ ID NO: 19397 - RNA, 21 nt, RNAi-sense strand
aaggaaauuaugacuuugguu

SEQ ID NO: 19398 - RNA, 21 nt, RNAi-antisense strand
ccaaagucauaauuuccuuuu

SEQ ID NO: 19399 - DNA, 21 bp, Homo sapiens
cagacacctggtattatgcca

SEQ ID NO: 19400 - RNA, 21 nt, RNAi-sense strand
gacaccugguauuaugccauu

SEQ ID NO: 19401 - RNA, 21 nt, RNAi-antisense strand
uggcauaauaccaggugucuu

SEQ ID NO: 19402 - DNA, 21 bp, Homo sapiens
cacacaatcatgcttcgtgat

SEQ ID NO: 19403 - RNA, 21 nt, RNAi-sense strand
cacaaucaugcuucgugauuu

SEQ ID NO: 19404 - RNA, 21 nt, RNAi-antisense strand
aucacgaagcaugauuguguu

SEQ ID NO: 19405 - DNA, 21 bp, Homo sapiens
cacaatcatgcttcgtgatag

SEQ ID NO: 19406 - RNA, 21 nt, RNAi-sense strand
caaucaugcuucgugauaguu

SEQ ID NO: 19407 - RNA, 21 nt, RNAi-antisense strand
cuaucacgaagcaugauuguu

SEQ ID NO: 19408 - DNA, 21 bp, Homo sapiens
caatcatgcttcgtgatagtg

SEQ ID NO: 19409 - RNA, 21 nt, RNAi-sense strand
aucaugcuucgugauaguguu

SEQ ID NO: 19410 - RNA, 21 nt, RNAi-antisense strand
cacuaucacgaagcaugauuu

SEQ ID NO: 19411 - DNA, 21 bp, Homo sapiens
catgcttcgtgatagtgttat

SEQ ID NO: 19412 - RNA, 21 nt, RNAi-sense strand
ugcuucgugauaguguuauuu

SEQ ID NO: 19413 - RNA, 21 nt, RNAi-antisense strand
auaacacuaucacgaagcauu

SEQ ID NO: 19414 - DNA, 21 bp, Homo sapiens
caagaatgtgtccagtttcta

SEQ ID NO: 19415 - RNA, 21 nt, RNAi-sense strand
agaauguguccaguuucuauu

SEQ ID NO: 19416 - RNA, 21 nt, RNAi-antisense strand
uagaaacuggacacauucuuu

SEQ ID NO: 19417 - DNA, 21 bp, Homo sapiens
cagtttctagaacactgtgaa

SEQ ID NO: 19418 - RNA, 21 nt, RNAi-sense strand
guuucuagaacacugugaauu

SEQ ID NO: 19419 - RNA, 21 nt, RNAi-antisense strand
uucacaguguucuagaaacuu

SEQ ID NO: 19420 - DNA, 21 bp, Homo sapiens
cactgtgaacttcatggcaga

SEQ ID NO: 19421 - RNA, 21 nt, RNAi-sense strand
cugugaacuucauggcagauu

SEQ ID NO: 19422 - RNA, 21 nt, RNAi-antisense strand
ucugccaugaaguucacaguu

SEQ ID NO: 19423 - DNA, 21 bp, Homo sapiens
catggcagaaacatacctgct

SEQ ID NO: 19424 - RNA, 21 nt, RNAi-sense strand
uggcagaaacauaccugcuuu

SEQ ID NO: 19425 - RNA, 21 nt, RNAi-antisense strand
agcagguauguuucugccauu

SEQ ID NO: 19426 - DNA, 21 bp, Homo sapiens
cagaaacatacctgctgttat

SEQ ID NO: 19427 - RNA, 21 nt, RNAi-sense strand
gaaacauaccugcuguuauuu

SEQ ID NO: 19428 - RNA, 21 nt, RNAi-antisense strand
auaacagcagguauguuucuu

SEQ ID NO: 19429 - DNA, 21 bp, Homo sapiens
catacctgctgttattgaaca

SEQ ID NO: 19430 - RNA, 21 nt, RNAi-sense strand
uaccugcuguuauugaacauu

SEQ ID NO: 19431 - RNA, 21 nt, RNAi-antisense strand
uguucaauaacagcagguauu

SEQ ID NO: 19432 - DNA, 21 bp, Homo sapiens
catgttggaaagaatacagtc

SEQ ID NO: 19433 - RNA, 21 nt, RNAi-sense strand
uguuggaaagaauacagucuu

SEQ ID NO: 19434 - RNA, 21 nt, RNAi-antisense strand
gacuguauucuuuccaacauu

SEQ ID NO: 19435 - DNA, 21 bp, Homo sapiens
cagtcacatatgagtctaggc

SEQ ID NO: 19436 - RNA, 21 nt, RNAi-sense strand
gucacauaugagucuaggcuu

SEQ ID NO: 19437 - RNA, 21 nt, RNAi-antisense strand
gccuagacucauaugugacuu

SEQ ID NO: 19438 - DNA, 21 bp, Homo sapiens
cacatatgagtctaggcagtt

SEQ ID NO: 19439 - RNA, 21 nt, RNAi-sense strand
cauaugagucuaggcaguuuu

SEQ ID NO: 19440 - RNA, 21 nt, RNAi-antisense strand
aacugccuagacucauauguu

SEQ ID NO: 19441 - DNA, 21 bp, Homo sapiens
catatgagtctaggcagttaa

SEQ ID NO: 19442 - RNA, 21 nt, RNAi-sense strand
uaugagucuaggcaguuaauu

SEQ ID NO: 19443 - RNA, 21 nt, RNAi-antisense strand
uuaacugccuagacucauauu

SEQ ID NO: 19444 - DNA, 21 bp, Homo sapiens
catgttgaactttgtacactt

SEQ ID NO: 19445 - RNA, 21 nt, RNAi-sense strand
uguugaacuuuguacacuuuu

SEQ ID NO: 19446 - RNA, 21 nt, RNAi-antisense strand
aaguguacaaaguucaacauu

SEQ ID NO: 19447 - DNA, 21 bp, Homo sapiens
cagaaagtgacatattctaag

SEQ ID NO: 19448 - RNA, 21 nt, RNAi-sense strand
gaaagugacauauucuaaguu

SEQ ID NO: 19449 - RNA, 21 nt, RNAi-antisense strand
cuuagaauaugucacuuucuu

SEQ ID NO: 19450 - DNA, 21 bp, Homo sapiens
cagaagttgtaatacgtttgt

SEQ ID NO: 19451 - RNA, 21 nt, RNAi-sense strand
gaaguuguaauacguuuguuu

SEQ ID NO: 19452 - RNA, 21 nt, RNAi-antisense strand
acaaacguauuacaacuucuu

SEQ ID NO: 19453 - DNA, 21 bp, Homo sapiens
gagttcaccgcggtcgtgtac

SEQ ID NO: 19454 - RNA, 21 nt, RNAi-sense strand
guucaccgcggucguguacuu

SEQ ID NO: 19455 - RNA, 21 nt, RNAi-antisense strand
guacacgaccgcggugaacuu

SEQ ID NO: 19456 - DNA, 21 bp, Homo sapiens
gaactggagcagtaccgcctg

SEQ ID NO: 19457 - RNA, 21 nt, RNAi-sense strand
acuggagcaguaccgccuguu

SEQ ID NO: 19458 - RNA, 21 nt, RNAi-antisense strand
caggcgguacugcuccaguuu

SEQ ID NO: 19459 - DNA, 21 bp, Homo sapiens
gagcagtaccgcctgtaccag

SEQ ID NO: 19460 - RNA, 21 nt, RNAi-sense strand
gcaguaccgccuguaccaguu

SEQ ID NO: 19461 - RNA, 21 nt, RNAi-antisense strand
cugguacaggcgguacugcuu

SEQ ID NO: 19462 - DNA, 21 bp, Homo sapiens
gagaatgagaccgatggccag

SEQ ID NO: 19463 - RNA, 21 nt, RNAi-sense strand
gaaugagaccgauggccaguu

SEQ ID NO: 19464 - RNA, 21 nt, RNAi-antisense strand
cuggccaucggucucauucuu

SEQ ID NO: 19465 - DNA, 21 bp, Homo sapiens
gaatgagaccgatggccagat

SEQ ID NO: 19466 - RNA, 21 nt, RNAi-sense strand
augagaccgauggccagauuu

SEQ ID NO: 19467 - RNA, 21 nt, RNAi-antisense strand
aucuggccaucggucucauuu

SEQ ID NO: 19468 - DNA, 21 bp, Homo sapiens
gagaccgatggccagatcaac

SEQ ID NO: 19469 - RNA, 21 nt, RNAi-sense strand
gaccgauggccagaucaacuu

SEQ ID NO: 19470 - RNA, 21 nt, RNAi-antisense strand
guugaucuggccaucggucuu

SEQ ID NO: 19471 - DNA, 21 bp, Homo sapiens
gaccgatggccagatcaacct

SEQ ID NO: 19472 - RNA, 21 nt, RNAi-sense strand
ccgauggccagaucaaccuuu

SEQ ID NO: 19473 - RNA, 21 nt, RNAi-antisense strand
agguugaucuggccaucgguu

SEQ ID NO: 19474 - DNA, 21 bp, Homo sapiens
gacagtatgcttcagcactga

SEQ ID NO: 19475 - RNA, 21 nt, RNAi-sense strand
caguaugcuucagcacugauu

SEQ ID NO: 19476 - RNA, 21 nt, RNAi-antisense strand
ucagugcugaagcauacuguu

SEQ ID NO: 19477 - DNA, 21 bp, Homo sapiens
gaagcatatcgctgagattat

SEQ ID NO: 19478 - RNA, 21 nt, RNAi-sense strand
agcauaucgcugagauuauuu

SEQ ID NO: 19479 - RNA, 21 nt, RNAi-antisense strand
auaaucucagcgauaugcuuu

SEQ ID NO: 19480 - DNA, 21 bp, Homo sapiens
gagattattgagcgtggcatc

SEQ ID NO: 19481 - RNA, 21 nt, RNAi-sense strand
gauuauugagcguggcaucuu

SEQ ID NO: 19482 - RNA, 21 nt, RNAi-antisense strand
gaugccacgcucaauaaucuu

SEQ ID NO: 19483 - DNA, 21 bp, Homo sapiens
gattattgagcgtggcatccg

SEQ ID NO: 19484 - RNA, 21 nt, RNAi-sense strand
uuauugagcguggcauccguu

SEQ ID NO: 19485 - RNA, 21 nt, RNAi-antisense strand
cggaugccacgcucaauaauu

SEQ ID NO: 19486 - DNA, 21 bp, Homo sapiens
gatgttcgcagtgttggcaac

SEQ ID NO: 19487 - RNA, 21 nt, RNAi-sense strand
uguucgcaguguuggcaacuu

SEQ ID NO: 19488 - RNA, 21 nt, RNAi-antisense strand
guugccaacacugcgaacauu

SEQ ID NO: 19489 - DNA, 21 bp, Homo sapiens
gactgctctggtggaagcctt

SEQ ID NO: 19490 - RNA, 21 nt, RNAi-sense strand
cugcucugguggaagccuuuu

SEQ ID NO: 19491 - RNA, 21 nt, RNAi-antisense strand
aaggcuuccaccagagcaguu

SEQ ID NO: 19492 - DNA, 21 bp, Homo sapiens
gaagccttcaaccttaaggca

SEQ ID NO: 19493 - RNA, 21 nt, RNAi-sense strand
agccuucaaccuuaaggcauu

SEQ ID NO: 19494 - RNA, 21 nt, RNAi-antisense strand
ugccuuaagguugaaggcuuu

SEQ ID NO: 19495 - DNA, 21 bp, Homo sapiens
gaataccaactgagaaactat

SEQ ID NO: 19496 - RNA, 21 nt, RNAi-sense strand
auaccaacugagaaacuauuu

SEQ ID NO: 19497 - RNA, 21 nt, RNAi-antisense strand
auaguuucucaguugguauuu

SEQ ID NO: 19498 - DNA, 21 bp, Homo sapiens
gagaaactatgaggcagctca

SEQ ID NO: 19499 - RNA, 21 nt, RNAi-sense strand
gaaacuaugaggcagcucauu

SEQ ID NO: 19500 - RNA, 21 nt, RNAi-antisense strand
ugagcugccucauaguuucuu

SEQ ID NO: 19501 - DNA, 21 bp, Homo sapiens
gaaactatgaggcagctcaag

SEQ ID NO: 19502 - RNA, 21 nt, RNAi-sense strand
aacuaugaggcagcucaaguu

SEQ ID NO: 19503 - RNA, 21 nt, RNAi-antisense strand
cuugagcugccucauaguuuu

SEQ ID NO: 19504 - DNA, 21 bp, Homo sapiens
gaacatggatgccaggcctac

SEQ ID NO: 19505 - RNA, 21 nt, RNAi-sense strand
acauggaugccaggccuacuu

SEQ ID NO: 19506 - RNA, 21 nt, RNAi-antisense strand
guaggccuggcauccauguuu

SEQ ID NO: 19507 - DNA, 21 bp, Homo sapiens
gacctggcagcagatgtcctg

SEQ ID NO: 19508 - RNA, 21 nt, RNAi-sense strand
ccuggcagcagauguccuguu

SEQ ID NO: 19509 - RNA, 21 nt, RNAi-antisense strand
caggacaucugcugccagguu

SEQ ID NO: 19510 - DNA, 21 bp, Homo sapiens
gatttataagttcctcacacc

SEQ ID NO: 19511 - RNA, 21 nt, RNAi-sense strand
uuuauaaguuccucacaccuu

SEQ ID NO: 19512 - RNA, 21 nt, RNAi-antisense strand
ggugugaggaacuuauaaauu

SEQ ID NO: 19513 - DNA, 21 bp, Homo sapiens
gacttcttggacgctgtgacc

SEQ ID NO: 19514 - RNA, 21 nt, RNAi-sense strand
cuucuuggacgcugugaccuu

SEQ ID NO: 19515 - RNA, 21 nt, RNAi-antisense strand
ggucacagcguccaagaaguu

SEQ ID NO: 19516 - DNA, 21 bp, Homo sapiens
gacgctgtgaccacttgccag

SEQ ID NO: 19517 - RNA, 21 nt, RNAi-sense strand
cgcugugaccacuugccaguu

SEQ ID NO: 19518 - RNA, 21 nt, RNAi-antisense strand
cuggcaaguggucacagcguu

SEQ ID NO: 19519 - DNA, 21 bp, Homo sapiens
gaccacttgccagacagctcc

SEQ ID NO: 19520 - RNA, 21 nt, RNAi-sense strand
ccacuugccagacagcuccuu

SEQ ID NO: 19521 - RNA, 21 nt, RNAi-antisense strand
ggagcugucuggcaagugguu

SEQ ID NO: 19522 - DNA, 21 bp, Homo sapiens
gacagctcctgaagaggcttt

SEQ ID NO: 19523 - RNA, 21 nt, RNAi-sense strand
cagcuccugaagaggcuuuuu

SEQ ID NO: 19524 - RNA, 21 nt, RNAi-antisense strand
aaagccucuucaggagcuguu

SEQ ID NO: 19525 - DNA, 21 bp, Homo sapiens
gaagaggctttcattaagctt

SEQ ID NO: 19526 - RNA, 21 nt, RNAi-sense strand
agaggcuuucauuaagcuuuu

SEQ ID NO: 19527 - RNA, 21 nt, RNAi-antisense strand
aagcuuaaugaaagccucuuu

SEQ ID NO: 19528 - DNA, 21 bp, Homo sapiens
gaggctttcattaagcttgat

SEQ ID NO: 19529 - RNA, 21 nt, RNAi-sense strand
ggcuuucauuaagcuugauuu

SEQ ID NO: 19530 - RNA, 21 nt, RNAi-antisense strand
aucaagcuuaaugaaagccuu

SEQ ID NO: 19531 - DNA, 21 bp, Homo sapiens
gatgctgactgaggtcctccg

SEQ ID NO: 19532 - RNA, 21 nt, RNAi-sense strand
ugcugacugagguccuccguu

SEQ ID NO: 19533 - RNA, 21 nt, RNAi-antisense strand
cggaggaccucagucagcauu

SEQ ID NO: 19534 - DNA, 21 bp, Homo sapiens
gactgaggtcctccggaaact

SEQ ID NO: 19535 - RNA, 21 nt, RNAi-sense strand
cugagguccuccggaaacuuu

SEQ ID NO: 19536 - RNA, 21 nt, RNAi-antisense strand
aguuuccggaggaccucaguu

SEQ ID NO: 19537 - DNA, 21 bp, Homo sapiens
gaggtcctccggaaacttacc

SEQ ID NO: 19538 - RNA, 21 nt, RNAi-sense strand
gguccuccggaaacuuaccuu

SEQ ID NO: 19539 - RNA, 21 nt, RNAi-antisense strand
gguaaguuuccggaggaccuu

SEQ ID NO: 19540 - DNA, 21 bp, Homo sapiens
gaaacttaccatacaagtaca

SEQ ID NO: 19541 - RNA, 21 nt, RNAi-sense strand
aacuuaccauacaaguacauu

SEQ ID NO: 19542 - RNA, 21 nt, RNAi-antisense strand
uguacuuguaugguaaguuuu

SEQ ID NO: 19543 - DNA, 21 bp, Homo sapiens
gaagcaagacacaatagagat

SEQ ID NO: 19544 - RNA, 21 nt, RNAi-sense strand
agcaagacacaauagagauuu

SEQ ID NO: 19545 - RNA, 21 nt, RNAi-antisense strand
aucucuauugugucuugcuuu

SEQ ID NO: 19546 - DNA, 21 bp, Homo sapiens
gacacaatagagatgatgaag

SEQ ID NO: 19547 - RNA, 21 nt, RNAi-sense strand
cacaauagagaugaugaaguu

SEQ ID NO: 19548 - RNA, 21 nt, RNAi-antisense strand
cuucaucaucucuauuguguu

SEQ ID NO: 19549 - DNA, 21 bp, Homo sapiens
gaatatgatgaaaccatggag

SEQ ID NO: 19550 - RNA, 21 nt, RNAi-sense strand
auaugaugaaaccauggaguu

SEQ ID NO: 19551 - RNA, 21 nt, RNAi-antisense strand
cuccaugguuucaucauauuu

SEQ ID NO: 19552 - DNA, 21 bp, Homo sapiens
gatgaaaccatggagaaatac

SEQ ID NO: 19553 - RNA, 21 nt, RNAi-sense strand
ugaaaccauggagaaauacuu

SEQ ID NO: 19554 - RNA, 21 nt, RNAi-antisense strand
guauuucuccaugguuucauu

SEQ ID NO: 19555 - DNA, 21 bp, Homo sapiens
gaaaccatggagaaatacatt

SEQ ID NO: 19556 - RNA, 21 nt, RNAi-sense strand
aaccauggagaaauacauuuu

SEQ ID NO: 19557 - RNA, 21 nt, RNAi-antisense strand
aauguauuucuccaugguuuu

SEQ ID NO: 19558 - DNA, 21 bp, Homo sapiens
gagaaatacattcctgtgttg

SEQ ID NO: 19559 - RNA, 21 nt, RNAi-sense strand
gaaauacauuccuguguuguu

SEQ ID NO: 19560 - RNA, 21 nt, RNAi-antisense strand
caacacaggaauguauuucuu

SEQ ID NO: 19561 - DNA, 21 bp, Homo sapiens
gaaatacattcctgtgttgat

SEQ ID NO: 19562 - RNA, 21 nt, RNAi-sense strand
aauacauuccuguguugauuu

SEQ ID NO: 19563 - RNA, 21 nt, RNAi-antisense strand
aucaacacaggaauguauuuu

SEQ ID NO: 19564 - DNA, 21 bp, Homo sapiens
gatcttccgcaaatctgtgga

SEQ ID NO: 19565 - RNA, 21 nt, RNAi-sense strand
ucuuccgcaaaucuguggauu

SEQ ID NO: 19566 - RNA, 21 nt, RNAi-antisense strand
uccacagauuugcggaagauu

SEQ ID NO: 19567 - DNA, 21 bp, Homo sapiens
gaattctgtaacgaccatgat

SEQ ID NO: 19568 - RNA, 21 nt, RNAi-sense strand
auucuguaacgaccaugauuu

SEQ ID NO: 19569 - RNA, 21 nt, RNAi-antisense strand
aucauggucguuacagaauuu

SEQ ID NO: 19570 - DNA, 21 bp, Homo sapiens
gaccatgatgtgtggaagttg

SEQ ID NO: 19571 - RNA, 21 nt, RNAi-sense strand
ccaugauguguggaaguuguu

SEQ ID NO: 19572 - RNA, 21 nt, RNAi-antisense strand
caacuuccacacaucaugguu

SEQ ID NO: 19573 - DNA, 21 bp, Homo sapiens
gatgtgtggaagttgaatgtg

SEQ ID NO: 19574 - RNA, 21 nt, RNAi-sense strand
uguguggaaguugaauguguu

SEQ ID NO: 19575 - RNA, 21 nt, RNAi-antisense strand
cacauucaacuuccacacauu

SEQ ID NO: 19576 - DNA, 21 bp, Homo sapiens
gaagttgaatgtggctcatgt

SEQ ID NO: 19577 - RNA, 21 nt, RNAi-sense strand
aguugaauguggcucauguuu

SEQ ID NO: 19578 - RNA, 21 nt, RNAi-antisense strand
acaugagccacauucaacuuu

SEQ ID NO: 19579 - DNA, 21 bp, Homo sapiens
gaatgtggctcatgttctgtt

SEQ ID NO: 19580 - RNA, 21 nt, RNAi-sense strand
auguggcucauguucuguuuu

SEQ ID NO: 19581 - RNA, 21 nt, RNAi-antisense strand
aacagaacaugagccacauuu

SEQ ID NO: 19582 - DNA, 21 bp, Homo sapiens
gaagccattggtttctatgaa

SEQ ID NO: 19583 - RNA, 21 nt, RNAi-sense strand
agccauugguuucuaugaauu

SEQ ID NO: 19584 - RNA, 21 nt, RNAi-antisense strand
uucauagaaaccaauggcuuu

SEQ ID NO: 19585 - DNA, 21 bp, Homo sapiens
gaagcattatgataacatcct

SEQ ID NO: 19586 - RNA, 21 nt, RNAi-sense strand
agcauuaugauaacauccuuu

SEQ ID NO: 19587 - RNA, 21 nt, RNAi-antisense strand
aggauguuaucauaaugcuuu

SEQ ID NO: 19588 - DNA, 21 bp, Homo sapiens
gataacatcctgaatgtcagt

SEQ ID NO: 19589 - RNA, 21 nt, RNAi-sense strand
uaacauccugaaugucaguuu

SEQ ID NO: 19590 - RNA, 21 nt, RNAi-antisense strand
acugacauucaggauguuauu

SEQ ID NO: 19591 - DNA, 21 bp, Homo sapiens
gaatgtcagtgctattgtact

SEQ ID NO: 19592 - RNA, 21 nt, RNAi-sense strand
augucagugcuauuguacuuu

SEQ ID NO: 19593 - RNA, 21 nt, RNAi-antisense strand
aguacaauagcacugacauuu

SEQ ID NO: 19594 - DNA, 21 bp, Homo sapiens
gaagaagcagaggagttgatg

SEQ ID NO: 19595 - RNA, 21 nt, RNAi-sense strand
agaagcagaggaguugauguu

SEQ ID NO: 19596 - RNA, 21 nt, RNAi-antisense strand
caucaacuccucugcuucuuu

SEQ ID NO: 19597 - DNA, 21 bp, Homo sapiens
gaagcagaggagttgatgagg

SEQ ID NO: 19598 - RNA, 21 nt, RNAi-sense strand
agcagaggaguugaugagguu

SEQ ID NO: 19599 - RNA, 21 nt, RNAi-antisense strand
ccucaucaacuccucugcuuu

SEQ ID NO: 19600 - DNA, 21 bp, Homo sapiens
gaggagttgatgaggaagatt

SEQ ID NO: 19601 - RNA, 21 nt, RNAi-sense strand
ggaguugaugaggaagauuuu

SEQ ID NO: 19602 - RNA, 21 nt, RNAi-antisense strand
aaucuuccucaucaacuccuu

SEQ ID NO: 19603 - DNA, 21 bp, Homo sapiens
gagttgatgaggaagattgaa

SEQ ID NO: 19604 - RNA, 21 nt, RNAi-sense strand
guugaugaggaagauugaauu

SEQ ID NO: 19605 - RNA, 21 nt, RNAi-antisense strand
uucaaucuuccucaucaacuu

SEQ ID NO: 19606 - DNA, 21 bp, Homo sapiens
gaggaagagcagctctcttat

SEQ ID NO: 19607 - RNA, 21 nt, RNAi-sense strand
ggaagagcagcucucuuauuu

SEQ ID NO: 19608 - RNA, 21 nt, RNAi-antisense strand
auaagagagcugcucuuccuu

SEQ ID NO: 19609 - DNA, 21 bp, Homo sapiens
gaagagcagctctcttatgat

SEQ ID NO: 19610 - RNA, 21 nt, RNAi-sense strand
agagcagcucucuuaugauuu

SEQ ID NO: 19611 - RNA, 21 nt, RNAi-antisense strand
aucauaagagagcugcucuuu

SEQ ID NO: 19612 - DNA, 21 bp, Homo sapiens
gagcagctctcttatgatgac

SEQ ID NO: 19613 - RNA, 21 nt, RNAi-sense strand
gcagcucucuuaugaugacuu

SEQ ID NO: 19614 - RNA, 21 nt, RNAi-antisense strand
gucaucauaagagagcugcuu

SEQ ID NO: 19615 - DNA, 21 bp, Homo sapiens
gaatttggtgataggaactct

SEQ ID NO: 19616 - RNA, 21 nt, RNAi-sense strand
auuuggugauaggaacucuuu

SEQ ID NO: 19617 - RNA, 21 nt, RNAi-antisense strand
agaguuccuaucaccaaauuu

SEQ ID NO: 19618 - DNA, 21 bp, Homo sapiens
gataggaactctttattgtgc

SEQ ID NO: 19619 - RNA, 21 nt, RNAi-sense strand
uaggaacucuuuauugugcuu

SEQ ID NO: 19620 - RNA, 21 nt, RNAi-antisense strand
gcacaauaaagaguuccuauu

SEQ ID NO: 19621 - DNA, 21 bp, Homo sapiens
gaactctttattgtgccaaag

SEQ ID NO: 19622 - RNA, 21 nt, RNAi-sense strand
acucuuuauugugccaaaguu

SEQ ID NO: 19623 - RNA, 21 nt, RNAi-antisense strand
cuuuggcacaauaaagaguuu

SEQ ID NO: 19624 - DNA, 21 bp, Homo sapiens
gactttggtatttctcgagtt

SEQ ID NO: 19625 - RNA, 21 nt, RNAi-sense strand
cuuugguauuucucgaguuuu

SEQ ID NO: 19626 - RNA, 21 nt, RNAi-antisense strand
aacucgagaaauaccaaaguu

SEQ ID NO: 19627 - DNA, 21 bp, Homo sapiens
gaacagacacctggtattatg

SEQ ID NO: 19628 - RNA, 21 nt, RNAi-sense strand
acagacaccugguauuauguu

SEQ ID NO: 19629 - RNA, 21 nt, RNAi-antisense strand
cauaauaccaggugucuguuu

SEQ ID NO: 19630 - DNA, 21 bp, Homo sapiens
gacacctggtattatgccaaa

SEQ ID NO: 19631 - RNA, 21 nt, RNAi-sense strand
caccugguauuaugccaaauu

SEQ ID NO: 19632 - RNA, 21 nt, RNAi-antisense strand
uuuggcauaauaccagguguu

SEQ ID NO: 19633 - DNA, 21 bp, Homo sapiens
gatgcttcctgtccttgttag

SEQ ID NO: 19634 - RNA, 21 nt, RNAi-sense strand
ugcuuccuguccuuguuaguu

SEQ ID NO: 19635 - RNA, 21 nt, RNAi-antisense strand
cuaacaaggacaggaagcauu

SEQ ID NO: 19636 - DNA, 21 bp, Homo sapiens
gaatgtgtccagtttctagaa

SEQ ID NO: 19637 - RNA, 21 nt, RNAi-sense strand
auguguccaguuucuagaauu

SEQ ID NO: 19638 - RNA, 21 nt, RNAi-antisense strand
uucuagaaacuggacacauuu

SEQ ID NO: 19639 - DNA, 21 bp, Homo sapiens
gaacactgtgaacttcatggc

SEQ ID NO: 19640 - RNA, 21 nt, RNAi-sense strand
acacugugaacuucauggcuu

SEQ ID NO: 19641 - RNA, 21 nt, RNAi-antisense strand
gccaugaaguucacaguguuu

SEQ ID NO: 19642 - DNA, 21 bp, Homo sapiens
gaacttcatggcagaaacata

SEQ ID NO: 19643 - RNA, 21 nt, RNAi-sense strand
acuucauggcagaaacauauu

SEQ ID NO: 19644 - RNA, 21 nt, RNAi-antisense strand
uauguuucugccaugaaguuu

SEQ ID NO: 19645 - DNA, 21 bp, Homo sapiens
gaaacatacctgctgttattg

SEQ ID NO: 19646 - RNA, 21 nt, RNAi-sense strand
aacauaccugcuguuauuguu

SEQ ID NO: 19647 - RNA, 21 nt, RNAi-antisense strand
caauaacagcagguauguuuu

SEQ ID NO: 19648 - DNA, 21 bp, Homo sapiens
gaagaagaaagaatgcatgtt

SEQ ID NO: 19649 - RNA, 21 nt, RNAi-sense strand
agaagaaagaaugcauguuuu

SEQ ID NO: 19650 - RNA, 21 nt, RNAi-antisense strand
aacaugcauucuuucuucuuu

SEQ ID NO: 19651 - DNA, 21 bp, Homo sapiens
gaagaaagaatgcatgttgga

SEQ ID NO: 19652 - RNA, 21 nt, RNAi-sense strand
agaaagaaugcauguuggauu

SEQ ID NO: 19653 - RNA, 21 nt, RNAi-antisense strand
uccaacaugcauucuuucuuu

SEQ ID NO: 19654 - DNA, 21 bp, Homo sapiens
gaaagaatgcatgttggaaag

SEQ ID NO: 19655 - RNA, 21 nt, RNAi-sense strand
aagaaugcauguuggaaaguu

SEQ ID NO: 19656 - RNA, 21 nt, RNAi-antisense strand
cuuuccaacaugcauucuuuu

SEQ ID NO: 19657 - DNA, 21 bp, Homo sapiens
gaatgcatgttggaaagaata

SEQ ID NO: 19658 - RNA, 21 nt, RNAi-sense strand
augcauguuggaaagaauauu

SEQ ID NO: 19659 - RNA, 21 nt, RNAi-antisense strand
uauucuuuccaacaugcauuu

SEQ ID NO: 19660 - DNA, 21 bp, Homo sapiens
gaaagaatacagtcacatatg

SEQ ID NO: 19661 - RNA, 21 nt, RNAi-sense strand
aagaauacagucacauauguu

SEQ ID NO: 19662 - RNA, 21 nt, RNAi-antisense strand
cauaugugacuguauucuuuu

SEQ ID NO: 19663 - DNA, 21 bp, Homo sapiens
gaatacagtcacatatgagtc

SEQ ID NO: 19664 - RNA, 21 nt, RNAi-sense strand
auacagucacauaugagucuu

SEQ ID NO: 19665 - RNA, 21 nt, RNAi-antisense strand
gacucauaugugacuguauuu

SEQ ID NO: 19666 - DNA, 21 bp, Homo sapiens
gatagtggcatttatcaaatg

SEQ ID NO: 19667 - RNA, 21 nt, RNAi-sense strand
uaguggcauuuaucaaauguu

SEQ ID NO: 19668 - RNA, 21 nt, RNAi-antisense strand
cauuugauaaaugccacuauu

SEQ ID NO: 19669 - DNA, 21 bp, Homo sapiens
gaactttgtacacttatgcat

SEQ ID NO: 19670 - RNA, 21 nt, RNAi-sense strand
acuuuguacacuuaugcauuu

SEQ ID NO: 19671 - RNA, 21 nt, RNAi-antisense strand
augcauaaguguacaaaguuu

SEQ ID NO: 19672 - DNA, 21 bp, Homo sapiens
gaggaatgtttatatcagaag

SEQ ID NO: 19673 - RNA, 21 nt, RNAi-sense strand
ggaauguuuauaucagaaguu

SEQ ID NO: 19674 - RNA, 21 nt, RNAi-antisense strand
cuucugauauaaacauuccuu

SEQ ID NO: 19675 - DNA, 21 bp, Homo sapiens
taccgcctcatccgcaatgca

SEQ ID NO: 19676 - RNA, 21 nt, RNAi-sense strand
ccgccucauccgcaaugcauu

SEQ ID NO: 19677 - RNA, 21 nt, RNAi-antisense strand
ugcauugcggaugaggcgguu

SEQ ID NO: 19678 - DNA, 21 bp, Homo sapiens
taggctactgctactaccgcc

SEQ ID NO: 19679 - RNA, 21 nt, RNAi-sense strand
ggcuacugcuacuaccgccuu

SEQ ID NO: 19680 - RNA, 21 nt, RNAi-antisense strand
ggcgguaguagcaguagccuu

SEQ ID NO: 19681 - DNA, 21 bp, Homo sapiens
tactgctactaccgcctgcag

SEQ ID NO: 19682 - RNA, 21 nt, RNAi-sense strand
cugcuacuaccgccugcaguu

SEQ ID NO: 19683 - RNA, 21 nt, RNAi-antisense strand
cugcaggcgguaguagcaguu

SEQ ID NO: 19684 - DNA, 21 bp, Homo sapiens
tactaccgcctgcaggagttc

SEQ ID NO: 19685 - RNA, 21 nt, RNAi-sense strand
cuaccgccugcaggaguucuu

SEQ ID NO: 19686 - RNA, 21 nt, RNAi-antisense strand
gaacuccugcaggcgguaguu

SEQ ID NO: 19687 - DNA, 21 bp, Homo sapiens
tacaacctggctttggcctat

SEQ ID NO: 19688 - RNA, 21 nt, RNAi-sense strand
caaccuggcuuuggccuauuu

SEQ ID NO: 19689 - RNA, 21 nt, RNAi-antisense strand
auaggccaaagccagguuguu

SEQ ID NO: 19690 - DNA, 21 bp, Homo sapiens
tattacagcagccgacagtat

SEQ ID NO: 19691 - RNA, 21 nt, RNAi-sense strand
uuacagcagccgacaguauuu

SEQ ID NO: 19692 - RNA, 21 nt, RNAi-antisense strand
auacugucggcugcuguaauu

SEQ ID NO: 19693 - DNA, 21 bp, Homo sapiens
tacagcagccgacagtatgct

SEQ ID NO: 19694 - RNA, 21 nt, RNAi-sense strand
cagcagccgacaguaugcuuu

SEQ ID NO: 19695 - RNA, 21 nt, RNAi-antisense strand
agcauacugucggcugcuguu

SEQ ID NO: 19696 - DNA, 21 bp, Homo sapiens
tatgcttcagcactgaagcat

SEQ ID NO: 19697 - RNA, 21 nt, RNAi-sense strand
ugcuucagcacugaagcauuu

SEQ ID NO: 19698 - RNA, 21 nt, RNAi-antisense strand
augcuucagugcugaagcauu

SEQ ID NO: 19699 - DNA, 21 bp, Homo sapiens
tatcgctgagattattgagcg

SEQ ID NO: 19700 - RNA, 21 nt, RNAi-sense strand
ucgcugagauuauugagcguu

SEQ ID NO: 19701 - RNA, 21 nt, RNAi-antisense strand
cgcucaauaaucucagcgauu

SEQ ID NO: 19702 - DNA, 21 bp, Homo sapiens
tattgagcgtggcatccgcca

SEQ ID NO: 19703 - RNA, 21 nt, RNAi-sense strand
uugagcguggcauccgccauu

SEQ ID NO: 19704 - RNA, 21 nt, RNAi-antisense strand
uggcggaugccacgcucaauu

SEQ ID NO: 19705 - DNA, 21 bp, Homo sapiens
tagtcctccatcagactgctc

SEQ ID NO: 19706 - RNA, 21 nt, RNAi-sense strand
guccuccaucagacugcucuu

SEQ ID NO: 19707 - RNA, 21 nt, RNAi-antisense strand
gagcagucugauggaggacuu

SEQ ID NO: 19708 - DNA, 21 bp, Homo sapiens
taaggcagctatagaatacca

SEQ ID NO: 19709 - RNA, 21 nt, RNAi-sense strand
aggcagcuauagaauaccauu

SEQ ID NO: 19710 - RNA, 21 nt, RNAi-antisense strand
ugguauucuauagcugccuuu

SEQ ID NO: 19711 - DNA, 21 bp, Homo sapiens
tagaataccaactgagaaact

SEQ ID NO: 19712 - RNA, 21 nt, RNAi-sense strand
gaauaccaacugagaaacuuu

SEQ ID NO: 19713 - RNA, 21 nt, RNAi-antisense strand
aguuucucaguugguauucuu

SEQ ID NO: 19714 - DNA, 21 bp, Homo sapiens
taccaactgagaaactatgag

SEQ ID NO: 19715 - RNA, 21 nt, RNAi-sense strand
ccaacugagaaacuaugaguu

SEQ ID NO: 19716 - RNA, 21 nt, RNAi-antisense strand
cucauaguuucucaguugguu

SEQ ID NO: 19717 - DNA, 21 bp, Homo sapiens
tatgaggcagctcaagaagcc

SEQ ID NO: 19718 - RNA, 21 nt, RNAi-sense strand
ugaggcagcucaagaagccuu

SEQ ID NO: 19719 - RNA, 21 nt, RNAi-antisense strand
ggcuucuugagcugccucauu

SEQ ID NO: 19720 - DNA, 21 bp, Homo sapiens
tacacaaccaggcactaatga

SEQ ID NO: 19721 - RNA, 21 nt, RNAi-sense strand
cacaaccaggcacuaaugauu

SEQ ID NO: 19722 - RNA, 21 nt, RNAi-antisense strand
ucauuagugccugguuguguu

SEQ ID NO: 19723 - DNA, 21 bp, Homo sapiens
taatgaacatggatgccaggc

SEQ ID NO: 19724 - RNA, 21 nt, RNAi-sense strand
augaacauggaugccaggcuu

SEQ ID NO: 19725 - RNA, 21 nt, RNAi-antisense strand
gccuggcauccauguucauuu

SEQ ID NO: 19726 - DNA, 21 bp, Homo sapiens
tatctctatgacttcttggac

SEQ ID NO: 19727 - RNA, 21 nt, RNAi-sense strand
ucucuaugacuucuuggacuu

SEQ ID NO: 19728 - RNA, 21 nt, RNAi-antisense strand
guccaagaagucauagagauu

SEQ ID NO: 19729 - DNA, 21 bp, Homo sapiens
tatgacttcttggacgctgtg

SEQ ID NO: 19730 - RNA, 21 nt, RNAi-sense strand
ugacuucuuggacgcuguguu

SEQ ID NO: 19731 - RNA, 21 nt, RNAi-antisense strand
cacagcguccaagaagucauu

SEQ ID NO: 19732 - DNA, 21 bp, Homo sapiens
taccatacaagtacaggaagc

SEQ ID NO: 19733 - RNA, 21 nt, RNAi-sense strand
ccauacaaguacaggaagcuu

SEQ ID NO: 19734 - RNA, 21 nt, RNAi-antisense strand
gcuuccuguacuuguaugguu

SEQ ID NO: 19735 - DNA, 21 bp, Homo sapiens
tacaagtacaggaagcaagac

SEQ ID NO: 19736 - RNA, 21 nt, RNAi-sense strand
caaguacaggaagcaagacuu

SEQ ID NO: 19737 - RNA, 21 nt, RNAi-antisense strand
gucuugcuuccuguacuuguu

SEQ ID NO: 19738 - DNA, 21 bp, Homo sapiens
tacaggaagcaagacacaata

SEQ ID NO: 19739 - RNA, 21 nt, RNAi-sense strand
caggaagcaagacacaauauu

SEQ ID NO: 19740 - RNA, 21 nt, RNAi-antisense strand
uauugugucuugcuuccuguu

SEQ ID NO: 19741 - DNA, 21 bp, Homo sapiens
tagagatgatgaagctatcaa

SEQ ID NO: 19742 - RNA, 21 nt, RNAi-sense strand
gagaugaugaagcuaucaauu

SEQ ID NO: 19743 - RNA, 21 nt, RNAi-antisense strand
uugauagcuucaucaucucuu

SEQ ID NO: 19744 - DNA, 21 bp, Homo sapiens
tatgatgaaaccatggagaaa

SEQ ID NO: 19745 - RNA, 21 nt, RNAi-sense strand
ugaugaaaccauggagaaauu

SEQ ID NO: 19746 - RNA, 21 nt, RNAi-antisense strand
uuucuccaugguuucaucauu

SEQ ID NO: 19747 - DNA, 21 bp, Homo sapiens
tacattcctgtgttgatggct

SEQ ID NO: 19748 - RNA, 21 nt, RNAi-sense strand
cauuccuguguugauggcuuu

SEQ ID NO: 19749 - RNA, 21 nt, RNAi-antisense strand
agccaucaacacaggaauguu

SEQ ID NO: 19750 - DNA, 21 bp, Homo sapiens
taacgaccatgatgtgtggaa

SEQ ID NO: 19751 - RNA, 21 nt, RNAi-sense strand
acgaccaugauguguggaauu

SEQ ID NO: 19752 - RNA, 21 nt, RNAi-antisense strand
uuccacacaucauggucguuu

SEQ ID NO: 19753 - DNA, 21 bp, Homo sapiens
tacaaagaagccattggtttc

SEQ ID NO: 19754 - RNA, 21 nt, RNAi-sense strand
caaagaagccauugguuucuu

SEQ ID NO: 19755 - RNA, 21 nt, RNAi-antisense strand
gaaaccaauggcuucuuuguu

SEQ ID NO: 19756 - DNA, 21 bp, Homo sapiens
tatgataacatcctgaatgtc

SEQ ID NO: 19757 - RNA, 21 nt, RNAi-sense strand
ugauaacauccugaaugucuu

SEQ ID NO: 19758 - RNA, 21 nt, RNAi-antisense strand
gacauucaggauguuaucauu

SEQ ID NO: 19759 - DNA, 21 bp, Homo sapiens
taacatcctgaatgtcagtgc

SEQ ID NO: 19760 - RNA, 21 nt, RNAi-sense strand
acauccugaaugucagugcuu

SEQ ID NO: 19761 - RNA, 21 nt, RNAi-antisense strand
gcacugacauucaggauguuu

SEQ ID NO: 19762 - DNA, 21 bp, Homo sapiens
tattgtactggctaatctctg

SEQ ID NO: 19763 - RNA, 21 nt, RNAi-sense strand
uuguacuggcuaaucucuguu

SEQ ID NO: 19764 - RNA, 21 nt, RNAi-antisense strand
cagagauuagccaguacaauu

SEQ ID NO: 19765 - DNA, 21 bp, Homo sapiens
tactggctaatctctgtgttt

SEQ ID NO: 19766 - RNA, 21 nt, RNAi-sense strand
cuggcuaaucucuguguuuuu

SEQ ID NO: 19767 - RNA, 21 nt, RNAi-antisense strand
aaacacagagauuagccaguu

SEQ ID NO: 19768 - DNA, 21 bp, Homo sapiens
taccatctctgcattgtgaat

SEQ ID NO: 19769 - RNA, 21 nt, RNAi-sense strand
ccaucucugcauugugaauuu

SEQ ID NO: 19770 - RNA, 21 nt, RNAi-antisense strand
auucacaaugcagagaugguu

SEQ ID NO: 19771 - DNA, 21 bp, Homo sapiens
taggaactctttattgtgcca

SEQ ID NO: 19772 - RNA, 21 nt, RNAi-sense strand
ggaacucuuuauugugccauu

SEQ ID NO: 19773 - RNA, 21 nt, RNAi-antisense strand
uggcacaauaaagaguuccuu

SEQ ID NO: 19774 - DNA, 21 bp, Homo sapiens
tatgactttggtatttctcga

SEQ ID NO: 19775 - RNA, 21 nt, RNAi-sense strand
ugacuuugguauuucucgauu

SEQ ID NO: 19776 - RNA, 21 nt, RNAi-antisense strand
ucgagaaauaccaaagucauu

SEQ ID NO: 19777 - DNA, 21 bp, Homo sapiens
tattcaagaatgtgtccagtt

SEQ ID NO: 19778 - RNA, 21 nt, RNAi-sense strand
uucaagaauguguccaguuuu

SEQ ID NO: 19779 - RNA, 21 nt, RNAi-antisense strand
aacuggacacauucuugaauu

SEQ ID NO: 19780 - DNA, 21 bp, Homo sapiens
tagaacactgtgaacttcatg

SEQ ID NO: 19781 - RNA, 21 nt, RNAi-sense strand
gaacacugugaacuucauguu

SEQ ID NO: 19782 - RNA, 21 nt, RNAi-antisense strand
caugaaguucacaguguucuu

SEQ ID NO: 19783 - DNA, 21 bp, Homo sapiens
tacctgctgttattgaacaac

SEQ ID NO: 19784 - RNA, 21 nt, RNAi-sense strand
ccugcuguuauugaacaacuu

SEQ ID NO: 19785 - RNA, 21 nt, RNAi-antisense strand
guuguucaauaacagcagguu

SEQ ID NO: 19786 - DNA, 21 bp, Homo sapiens
tacagtcacatatgagtctag

SEQ ID NO: 19787 - RNA, 21 nt, RNAi-sense strand
cagucacauaugagucuaguu

SEQ ID NO: 19788 - RNA, 21 nt, RNAi-antisense strand
cuagacucauaugugacuguu

SEQ ID NO: 19789 - DNA, 21 bp, Homo sapiens
tatagtaatagctgatagtgg

SEQ ID NO: 19790 - RNA, 21 nt, RNAi-sense strand
uaguaauagcugauagugguu

SEQ ID NO: 19791 - RNA, 21 nt, RNAi-antisense strand
ccacuaucagcuauuacuauu

SEQ ID NO: 19792 - DNA, 21 bp, Homo sapiens
tagtaatagctgatagtggca

SEQ ID NO: 19793 - RNA, 21 nt, RNAi-sense strand
guaauagcugauaguggcauu

SEQ ID NO: 19794 - RNA, 21 nt, RNAi-antisense strand
ugccacuaucagcuauuacuu

SEQ ID NO: 19795 - DNA, 21 bp, Homo sapiens
taatagctgatagtggcattt

SEQ ID NO: 19796 - RNA, 21 nt, RNAi-sense strand
auagcugauaguggcauuuuu

SEQ ID NO: 19797 - RNA, 21 nt, RNAi-antisense strand
aaaugccacuaucagcuauuu

SEQ ID NO: 19798 - DNA, 21 bp, Homo sapiens
tagctgatagtggcatttatc

SEQ ID NO: 19799 - RNA, 21 nt, RNAi-sense strand
gcugauaguggcauuuaucuu

SEQ ID NO: 19800 - RNA, 21 nt, RNAi-antisense strand
gauaaaugccacuaucagcuu

SEQ ID NO: 19801 - DNA, 21 bp, Homo sapiens
tagtggcatttatcaaatggc

SEQ ID NO: 19802 - RNA, 21 nt, RNAi-sense strand
guggcauuuaucaaauggcuu

SEQ ID NO: 19803 - RNA, 21 nt, RNAi-antisense strand
gccauuugauaaaugccacuu

SEQ ID NO: 19804 - DNA, 21 bp, Homo sapiens
tacatgttgaactttgtacac

SEQ ID NO: 19805 - RNA, 21 nt, RNAi-sense strand
cauguugaacuuuguacacuu

SEQ ID NO: 19806 - RNA, 21 nt, RNAi-antisense strand
guguacaaaguucaacauguu

SEQ ID NO: 19807 - DNA, 21 bp, Homo sapiens
aaacttaccatacaagtacag

SEQ ID NO: 19808 - RNA, 21 nt, RNAi-sense strand
acuuaccauacaaguacaguu

SEQ ID NO: 19809 - RNA, 21 nt, RNAi-antisense strand
cuguacuuguaugguaaguuu

SEQ ID NO: 19810 - DNA, 21 bp, Homo sapiens
aacttaccatacaagtacagg

SEQ ID NO: 19811 - RNA, 21 nt, RNAi-sense strand
cuuaccauacaaguacagguu

SEQ ID NO: 19812 - RNA, 21 nt, RNAi-antisense strand
ccuguacuuguaugguaaguu

SEQ ID NO: 19813 - DNA, 21 bp, Homo sapiens
aaacacacaatcatgcttcgt

SEQ ID NO: 19814 - RNA, 21 nt, RNAi-sense strand
acacacaaucaugcuucguuu

SEQ ID NO: 19815 - RNA, 21 nt, RNAi-antisense strand
acgaagcaugauuguguguuu

SEQ ID NO: 19816 - DNA, 21 bp, Homo sapiens
aacacacaatcatgcttcgtg

SEQ ID NO: 19817 - RNA, 21 nt, RNAi-sense strand
cacacaaucaugcuucguguu

SEQ ID NO: 19818 - RNA, 21 nt, RNAi-antisense strand
cacgaagcaugauuguguguu

SEQ ID NO: 19819 - DNA, 21 bp, Homo sapiens
aatcatgcttcgtgatagtgt

SEQ ID NO: 19820 - RNA, 21 nt, RNAi-sense strand
ucaugcuucgugauaguguuu

SEQ ID NO: 19821 - RNA, 21 nt, RNAi-antisense strand
acacuaucacgaagcaugauu

SEQ ID NO: 19822 - DNA, 21 bp, Homo sapiens
cacacaatcatgcttcgtgat

SEQ ID NO: 19823 - RNA, 21 nt, RNAi-sense strand
cacaaucaugcuucgugauuu

SEQ ID NO: 19824 - RNA, 21 nt, RNAi-antisense strand
aucacgaagcaugauuguguu

SEQ ID NO: 19825 - DNA, 21 bp, Homo sapiens
cacaatcatgcttcgtgatag

SEQ ID NO: 19826 - RNA, 21 nt, RNAi-sense strand
caaucaugcuucgugauaguu

SEQ ID NO: 19827 - RNA, 21 nt, RNAi-antisense strand
cuaucacgaagcaugauuguu

SEQ ID NO: 19828 - DNA, 21 bp, Homo sapiens
caatcatgcttcgtgatagtg

SEQ ID NO: 19829 - RNA, 21 nt, RNAi-sense strand
aucaugcuucgugauaguguu

SEQ ID NO: 19830 - RNA, 21 nt, RNAi-antisense strand
cacuaucacgaagcaugauuu

SEQ ID NO: 19831 - DNA, 21 bp, Homo sapiens
catgcttcgtgatagtgttat

SEQ ID NO: 19832 - RNA, 21 nt, RNAi-sense strand
ugcuucgugauaguguuauuu

SEQ ID NO: 19833 - RNA, 21 nt, RNAi-antisense strand
auaacacuaucacgaagcauu

SEQ ID NO: 19834 - DNA, 21 bp, Homo sapiens
cactgtgaacttcatggcaga

SEQ ID NO: 19835 - RNA, 21 nt, RNAi-sense strand
cugugaacuucauggcagauu

SEQ ID NO: 19836 - RNA, 21 nt, RNAi-antisense strand
ucugccaugaaguucacaguu

SEQ ID NO: 19837 - DNA, 21 bp, Homo sapiens
gacagtatgcttcagcactga

SEQ ID NO: 19838 - RNA, 21 nt, RNAi-sense strand
caguaugcuucagcacugauu

SEQ ID NO: 19839 - RNA, 21 nt, RNAi-antisense strand
ucagugcugaagcauacuguu

SEQ ID NO: 19840 - DNA, 21 bp, Homo sapiens
gaaactatgaggcagctcaag

SEQ ID NO: 19841 - RNA, 21 nt, RNAi-sense strand
aacuaugaggcagcucaaguu

SEQ ID NO: 19842 - RNA, 21 nt, RNAi-antisense strand
cuugagcugccucauaguuuu

SEQ ID NO: 19843 - DNA, 21 bp, Homo sapiens
aagtactgctcggcgtgcacg

SEQ ID NO: 19844 - RNA, 21 nt, RNAi-sense strand
guacugcucggcgugcacguu

SEQ ID NO: 19845 - RNA, 21 nt, RNAi-antisense strand
cgugcacgccgagcaguacuu

SEQ ID NO: 19846 - DNA, 21 bp, Homo sapiens
aaactattgccaggcatctta

SEQ ID NO: 19847 - RNA, 21 nt, RNAi-sense strand
acuauugccaggcaucuuauu

SEQ ID NO: 19848 - RNA, 21 nt, RNAi-antisense strand
uaagaugccuggcaauaguuu

SEQ ID NO: 19849 - DNA, 21 bp, Homo sapiens
aactattgccaggcatcttaa

SEQ ID NO: 19850 - RNA, 21 nt, RNAi-sense strand
cuauugccaggcaucuuaauu

SEQ ID NO: 19851 - RNA, 21 nt, RNAi-antisense strand
uuaagaugccuggcaauaguu

SEQ ID NO: 19852 - DNA, 21 bp, Homo sapiens
aaccaagaagttgcagttcgt

SEQ ID NO: 19853 - RNA, 21 nt, RNAi-sense strand
ccaagaaguugcaguucguuu

SEQ ID NO: 19854 - RNA, 21 nt, RNAi-antisense strand
acgaacugcaacuucuugguu

SEQ ID NO: 19855 - DNA, 21 bp, Homo sapiens
aagaagttgcagttcgtgcaa

SEQ ID NO: 19856 - RNA, 21 nt, RNAi-sense strand
gaaguugcaguucgugcaauu

SEQ ID NO: 19857 - RNA, 21 nt, RNAi-antisense strand
uugcacgaacugcaacuucuu

SEQ ID NO: 19858 - DNA, 21 bp, Homo sapiens
aagttgcagttcgtgcaaatc

SEQ ID NO: 19859 - RNA, 21 nt, RNAi-sense strand
guugcaguucgugcaaaucuu

SEQ ID NO: 19860 - RNA, 21 nt, RNAi-antisense strand
gauuugcacgaacugcaacuu

SEQ ID NO: 19861 - DNA, 21 bp, Homo sapiens
aaagagatgccaggctcactt

SEQ ID NO: 19862 - RNA, 21 nt, RNAi-sense strand
agagaugccaggcucacuuuu

SEQ ID NO: 19863 - RNA, 21 nt, RNAi-antisense strand
aagugagccuggcaucucuuu

SEQ ID NO: 19864 - DNA, 21 bp, Homo sapiens
aagagatgccaggctcactta

SEQ ID NO: 19865 - RNA, 21 nt, RNAi-sense strand
gagaugccaggcucacuuauu

SEQ ID NO: 19866 - RNA, 21 nt, RNAi-antisense strand
uaagugagccuggcaucucuu

SEQ ID NO: 19867 - DNA, 21 bp, Homo sapiens
aaagaatatgaggaggctaat

SEQ ID NO: 19868 - RNA, 21 nt, RNAi-sense strand
agaauaugaggaggcuaauuu

SEQ ID NO: 19869 - RNA, 21 nt, RNAi-antisense strand
auuagccuccucauauucuuu

SEQ ID NO: 19870 - DNA, 21 bp, Homo sapiens
aagaatatgaggaggctaatt

SEQ ID NO: 19871 - RNA, 21 nt, RNAi-sense strand
gaauaugaggaggcuaauuuu

SEQ ID NO: 19872 - RNA, 21 nt, RNAi-antisense strand
aauuagccuccucauauucuu

SEQ ID NO: 19873 - DNA, 21 bp, Homo sapiens
aatatgaggaggctaatttca

SEQ ID NO: 19874 - RNA, 21 nt, RNAi-sense strand
uaugaggaggcuaauuucauu

SEQ ID NO: 19875 - RNA, 21 nt, RNAi-antisense strand
ugaaauuagccuccucauauu

SEQ ID NO: 19876 - DNA, 21 bp, Homo sapiens
aatttcagagctatatgtgcg

SEQ ID NO: 19877 - RNA, 21 nt, RNAi-sense strand
uuucagagcuauaugugcguu

SEQ ID NO: 19878 - RNA, 21 nt, RNAi-antisense strand
cgcacauauagcucugaaauu

SEQ ID NO: 19879 - DNA, 21 bp, Homo sapiens
aaagccactgtgttggtttgg

SEQ ID NO: 19880 - RNA, 21 nt, RNAi-sense strand
agccacuguguugguuugguu

SEQ ID NO: 19881 - RNA, 21 nt, RNAi-antisense strand
ccaaaccaacacaguggcuuu

SEQ ID NO: 19882 - DNA, 21 bp, Homo sapiens
aagccactgtgttggtttgga

SEQ ID NO: 19883 - RNA, 21 nt, RNAi-sense strand
gccacuguguugguuuggauu

SEQ ID NO: 19884 - RNA, 21 nt, RNAi-antisense strand
uccaaaccaacacaguggcuu

SEQ ID NO: 19885 - DNA, 21 bp, Homo sapiens
aatgtggatcttcatgtcttt

SEQ ID NO: 19886 - RNA, 21 nt, RNAi-sense strand
uguggaucuucaugucuuuuu

SEQ ID NO: 19887 - RNA, 21 nt, RNAi-antisense strand
aaagacaugaagauccacauu

SEQ ID NO: 19888 - DNA, 21 bp, Homo sapiens
aacagttagctactggtggaa

SEQ ID NO: 19889 - RNA, 21 nt, RNAi-sense strand
caguuagcuacugguggaauu

SEQ ID NO: 19890 - RNA, 21 nt, RNAi-antisense strand
uuccaccaguagcuaacuguu

SEQ ID NO: 19891 - DNA, 21 bp, Homo sapiens
aattctgtggtttcctgacct

SEQ ID NO: 19892 - RNA, 21 nt, RNAi-sense strand
uucugugguuuccugaccuuu

SEQ ID NO: 19893 - RNA, 21 nt, RNAi-antisense strand
aggucaggaaaccacagaauu

SEQ ID NO: 19894 - DNA, 21 bp, Homo sapiens
aatagtggagatttgtgctct

SEQ ID NO: 19895 - RNA, 21 nt, RNAi-sense strand
uaguggagauuugugcucuuu

SEQ ID NO: 19896 - RNA, 21 nt, RNAi-antisense strand
agagcacaaaucuccacuauu

SEQ ID NO: 19897 - DNA, 21 bp, Homo sapiens
aatgtcggtgttgatgatacc

SEQ ID NO: 19898 - RNA, 21 nt, RNAi-sense strand
ugucgguguugaugauaccuu

SEQ ID NO: 19899 - RNA, 21 nt, RNAi-antisense strand
gguaucaucaacaccgacauu

SEQ ID NO: 19900 - DNA, 21 bp, Homo sapiens
aattgttctctactggttatg

SEQ ID NO: 19901 - RNA, 21 nt, RNAi-sense strand
uuguucucuacugguuauguu

SEQ ID NO: 19902 - RNA, 21 nt, RNAi-antisense strand
cauaaccaguagagaacaauu

SEQ ID NO: 19903 - DNA, 21 bp, Homo sapiens
aatttgctgctgcgttctcct

SEQ ID NO: 19904 - RNA, 21 nt, RNAi-sense strand
uuugcugcugcguucuccuuu

SEQ ID NO: 19905 - RNA, 21 nt, RNAi-antisense strand
aggagaacgcagcagcaaauu

SEQ ID NO: 19906 - DNA, 21 bp, Homo sapiens
aactttgccgaataccatcga

SEQ ID NO: 19907 - RNA, 21 nt, RNAi-sense strand
cuuugccgaauaccaucgauu

SEQ ID NO: 19908 - RNA, 21 nt, RNAi-antisense strand
ucgaugguauucggcaaaguu

SEQ ID NO: 19909 - DNA, 21 bp, Homo sapiens
aataccatcgaccaagtcaga

SEQ ID NO: 19910 - RNA, 21 nt, RNAi-sense strand
uaccaucgaccaagucagauu

SEQ ID NO: 19911 - RNA, 21 nt, RNAi-antisense strand
ucugacuuggucgaugguauu

SEQ ID NO: 19912 - DNA, 21 bp, Homo sapiens
aagtcagattcagaaactcct

SEQ ID NO: 19913 - RNA, 21 nt, RNAi-sense strand
gucagauucagaaacuccuuu

SEQ ID NO: 19914 - RNA, 21 nt, RNAi-antisense strand
aggaguuucugaaucugacuu

SEQ ID NO: 19915 - DNA, 21 bp, Homo sapiens
aaagacatatttgctgccttt

SEQ ID NO: 19916 - RNA, 21 nt, RNAi-sense strand
agacauauuugcugccuuuuu

SEQ ID NO: 19917 - RNA, 21 nt, RNAi-antisense strand
aaaggcagcaaauaugucuuu

SEQ ID NO: 19918 - DNA, 21 bp, Homo sapiens
aagacatatttgctgccttta

SEQ ID NO: 19919 - RNA, 21 nt, RNAi-sense strand
gacauauuugcugccuuuauu

SEQ ID NO: 19920 - RNA, 21 nt, RNAi-antisense strand
uaaaggcagcaaauaugucuu

SEQ ID NO: 19921 - DNA, 21 bp, Homo sapiens
aaacagttgcaggagtcacta

SEQ ID NO: 19922 - RNA, 21 nt, RNAi-sense strand
acaguugcaggagucacuauu

SEQ ID NO: 19923 - RNA, 21 nt, RNAi-antisense strand
uagugacuccugcaacuguuu

SEQ ID NO: 19924 - DNA, 21 bp, Homo sapiens
aacagttgcaggagtcactat

SEQ ID NO: 19925 - RNA, 21 nt, RNAi-sense strand
caguugcaggagucacuauuu

SEQ ID NO: 19926 - RNA, 21 nt, RNAi-antisense strand
auagugacuccugcaacuguu

SEQ ID NO: 19927 - DNA, 21 bp, Homo sapiens
aagatgtaatccagaccaggc

SEQ ID NO: 19928 - RNA, 21 nt, RNAi-sense strand
gauguaauccagaccaggcuu

SEQ ID NO: 19929 - RNA, 21 nt, RNAi-antisense strand
gccuggucuggauuacaucuu

SEQ ID NO: 19930 - DNA, 21 bp, Homo sapiens
aatccagaccaggcacagtgg

SEQ ID NO: 19931 - RNA, 21 nt, RNAi-sense strand
uccagaccaggcacagugguu

SEQ ID NO: 19932 - RNA, 21 nt, RNAi-antisense strand
ccacugugccuggucuggauu

SEQ ID NO: 19933 - DNA, 21 bp, Homo sapiens
aatcgcttgaacctggaatac

SEQ ID NO: 19934 - RNA, 21 nt, RNAi-sense strand
ucgcuugaaccuggaauacuu

SEQ ID NO: 19935 - RNA, 21 nt, RNAi-antisense strand
guauuccagguucaagcgauu

SEQ ID NO: 19936 - DNA, 21 bp, Homo sapiens
aacctggaatacagaggtttc

SEQ ID NO: 19937 - RNA, 21 nt, RNAi-sense strand
ccuggaauacagagguuucuu

SEQ ID NO: 19938 - RNA, 21 nt, RNAi-antisense strand
gaaaccucuguauuccagguu

SEQ ID NO: 19939 - DNA, 21 bp, Homo sapiens
aatacagaggtttcagtgagc

SEQ ID NO: 19940 - RNA, 21 nt, RNAi-sense strand
uacagagguuucagugagcuu

SEQ ID NO: 19941 - RNA, 21 nt, RNAi-antisense strand
gcucacugaaaccucuguauu

SEQ ID NO: 19942 - DNA, 21 bp, Homo sapiens
aacaagagtgaaacgctatca

SEQ ID NO: 19943 - RNA, 21 nt, RNAi-sense strand
caagagugaaacgcuaucauu

SEQ ID NO: 19944 - RNA, 21 nt, RNAi-antisense strand
ugauagcguuucacucuuguu

SEQ ID NO: 19945 - DNA, 21 bp, Homo sapiens
aagagtgaaacgctatcaaag

SEQ ID NO: 19946 - RNA, 21 nt, RNAi-sense strand
gagugaaacgcuaucaaaguu

SEQ ID NO: 19947 - RNA, 21 nt, RNAi-antisense strand
cuuugauagcguuucacucuu

SEQ ID NO: 19948 - DNA, 21 bp, Homo sapiens
aatgcagtatgtttgtgaaag

SEQ ID NO: 19949 - RNA, 21 nt, RNAi-sense strand
ugcaguauguuugugaaaguu

SEQ ID NO: 19950 - RNA, 21 nt, RNAi-antisense strand
cuuucacaaacauacugcauu

SEQ ID NO: 19951 - DNA, 21 bp, Homo sapiens
aatagaaccaaagtgcctgtc

SEQ ID NO: 19952 - RNA, 21 nt, RNAi-sense strand
uagaaccaaagugccugucuu

SEQ ID NO: 19953 - RNA, 21 nt, RNAi-antisense strand
gacaggcacuuugguucuauu

SEQ ID NO: 19954 - DNA, 21 bp, Homo sapiens
aaccaaagtgcctgtctctgt

SEQ ID NO: 19955 - RNA, 21 nt, RNAi-sense strand
ccaaagugccugucucuguuu

SEQ ID NO: 19956 - RNA, 21 nt, RNAi-antisense strand
acagagacaggcacuuugguu

SEQ ID NO: 19957 - DNA, 21 bp, Homo sapiens
aaagtgcctgtctctgtttat

SEQ ID NO: 19958 - RNA, 21 nt, RNAi-sense strand
agugccugucucuguuuauuu

SEQ ID NO: 19959 - RNA, 21 nt, RNAi-antisense strand
auaaacagagacaggcacuuu

SEQ ID NO: 19960 - DNA, 21 bp, Homo sapiens
aagtgcctgtctctgtttata

SEQ ID NO: 19961 - RNA, 21 nt, RNAi-sense strand
gugccugucucuguuuauauu

SEQ ID NO: 19962 - RNA, 21 nt, RNAi-antisense strand
uauaaacagagacaggcacuu

SEQ ID NO: 19963 - DNA, 21 bp, Homo sapiens
aaagttacagtttgttagagc

SEQ ID NO: 19964 - RNA, 21 nt, RNAi-sense strand
aguuacaguuuguuagagcuu

SEQ ID NO: 19965 - RNA, 21 nt, RNAi-antisense strand
gcucuaacaaacuguaacuuu

SEQ ID NO: 19966 - DNA, 21 bp, Homo sapiens
aagttacagtttgttagagct

SEQ ID NO: 19967 - RNA, 21 nt, RNAi-sense strand
guuacaguuuguuagagcuuu

SEQ ID NO: 19968 - RNA, 21 nt, RNAi-antisense strand
agcucuaacaaacuguaacuu

SEQ ID NO: 19969 - DNA, 21 bp, Homo sapiens
aaataagaggatcagtgagat

SEQ ID NO: 19970 - RNA, 21 nt, RNAi-sense strand
auaagaggaucagugagauuu

SEQ ID NO: 19971 - RNA, 21 nt, RNAi-antisense strand
aucucacugauccucuuauuu

SEQ ID NO: 19972 - DNA, 21 bp, Homo sapiens
aataagaggatcagtgagatg

SEQ ID NO: 19973 - RNA, 21 nt, RNAi-sense strand
uaagaggaucagugagauguu

SEQ ID NO: 19974 - RNA, 21 nt, RNAi-antisense strand
caucucacugauccucuuauu

SEQ ID NO: 19975 - DNA, 21 bp, Homo sapiens
aagaggatcagtgagatgatt

SEQ ID NO: 19976 - RNA, 21 nt, RNAi-sense strand
gaggaucagugagaugauuuu

SEQ ID NO: 19977 - RNA, 21 nt, RNAi-antisense strand
aaucaucucacugauccucuu

SEQ ID NO: 19978 - DNA, 21 bp, Homo sapiens
aatctcagctcactgcaacct

SEQ ID NO: 19979 - RNA, 21 nt, RNAi-sense strand
ucucagcucacugcaaccuuu

SEQ ID NO: 19980 - RNA, 21 nt, RNAi-antisense strand
agguugcagugagcugagauu

SEQ ID NO: 19981 - DNA, 21 bp, Homo sapiens
aactgctgacctcaactaatc

SEQ ID NO: 19982 - RNA, 21 nt, RNAi-sense strand
cugcugaccucaacuaaucuu

SEQ ID NO: 19983 - RNA, 21 nt, RNAi-antisense strand
gauuaguugaggucagcaguu

SEQ ID NO: 19984 - DNA, 21 bp, Homo sapiens
aatgagacagagtctctctct

SEQ ID NO: 19985 - RNA, 21 nt, RNAi-sense strand
ugagacagagucucucucuuu

SEQ ID NO: 19986 - RNA, 21 nt, RNAi-antisense strand
agagagagacucugucucauu

SEQ ID NO: 19987 - DNA, 21 bp, Homo sapiens
aagcaattctcctacctcagc

SEQ ID NO: 19988 - RNA, 21 nt, RNAi-sense strand
gcaauucuccuaccucagcuu

SEQ ID NO: 19989 - RNA, 21 nt, RNAi-antisense strand
gcugagguaggagaauugcuu

SEQ ID NO: 19990 - DNA, 21 bp, Homo sapiens
aattctcctacctcagcctac

SEQ ID NO: 19991 - RNA, 21 nt, RNAi-sense strand
uucuccuaccucagccuacuu

SEQ ID NO: 19992 - RNA, 21 nt, RNAi-antisense strand
guaggcugagguaggagaauu

SEQ ID NO: 19993 - DNA, 21 bp, Homo sapiens
aactcctggcctcaagtgatc

SEQ ID NO: 19994 - RNA, 21 nt, RNAi-sense strand
cuccuggccucaagugaucuu

SEQ ID NO: 19995 - RNA, 21 nt, RNAi-antisense strand
gaucacuugaggccaggaguu

SEQ ID NO: 19996 - DNA, 21 bp, Homo sapiens
aatcttaagactcacaatacg

SEQ ID NO: 19997 - RNA, 21 nt, RNAi-sense strand
ucuuaagacucacaauacguu

SEQ ID NO: 19998 - RNA, 21 nt, RNAi-antisense strand
cguauugugagucuuaagauu

SEQ ID NO: 19999 - DNA, 21 bp, Homo sapiens
aaagtagtccatgcatacaag

SEQ ID NO: 20000 - RNA, 21 nt, RNAi-sense strand
aguaguccaugcauacaaguu

SEQ ID NO: 20001 - RNA, 21 nt, RNAi-antisense strand
cuuguaugcauggacuacuuu

SEQ ID NO: 20002 - DNA, 21 bp, Homo sapiens
aagtagtccatgcatacaagt

SEQ ID NO: 20003 - RNA, 21 nt, RNAi-sense strand
guaguccaugcauacaaguuu

SEQ ID NO: 20004 - RNA, 21 nt, RNAi-antisense strand
acuuguaugcauggacuacuu

SEQ ID NO: 20005 - DNA, 21 bp, Homo sapiens
aacatggtagatgatgttgcc

SEQ ID NO: 20006 - RNA, 21 nt, RNAi-sense strand
caugguagaugauguugccuu

SEQ ID NO: 20007 - RNA, 21 nt, RNAi-antisense strand
ggcaacaucaucuaccauguu

SEQ ID NO: 20008 - DNA, 21 bp, Homo sapiens
aagaagtctggaatacagagt

SEQ ID NO: 20009 - RNA, 21 nt, RNAi-sense strand
gaagucuggaauacagaguuu

SEQ ID NO: 20010 - RNA, 21 nt, RNAi-antisense strand
acucuguauuccagacuucuu

SEQ ID NO: 20011 - DNA, 21 bp, Homo sapiens
aagtctggaatacagagtgta

SEQ ID NO: 20012 - RNA, 21 nt, RNAi-sense strand
gucuggaauacagaguguauu

SEQ ID NO: 20013 - RNA, 21 nt, RNAi-antisense strand
uacacucuguauuccagacuu

SEQ ID NO: 20014 - DNA, 21 bp, Homo sapiens
aatacagagtgtaacactgtg

SEQ ID NO: 20015 - RNA, 21 nt, RNAi-sense strand
uacagaguguaacacuguguu

SEQ ID NO: 20016 - RNA, 21 nt, RNAi-antisense strand
cacaguguuacacucuguauu

SEQ ID NO: 20017 - DNA, 21 bp, Homo sapiens
aacactgtgtactgctagcac

SEQ ID NO: 20018 - RNA, 21 nt, RNAi-sense strand
cacuguguacugcuagcacuu

SEQ ID NO: 20019 - RNA, 21 nt, RNAi-antisense strand
gugcuagcaguacacaguguu

SEQ ID NO: 20020 - DNA, 21 bp, Homo sapiens
aagcattcagattgtttagtc

SEQ ID NO: 20021 - RNA, 21 nt, RNAi-sense strand
gcauucagauuguuuagucuu

SEQ ID NO: 20022 - RNA, 21 nt, RNAi-antisense strand
gacuaaacaaucugaaugcuu

SEQ ID NO: 20023 - DNA, 21 bp, Homo sapiens
aaattgtggatccagttactt

SEQ ID NO: 20024 - RNA, 21 nt, RNAi-sense strand
auuguggauccaguuacuuuu

SEQ ID NO: 20025 - RNA, 21 nt, RNAi-antisense strand
aaguaacuggauccacaauuu

SEQ ID NO: 20026 - DNA, 21 bp, Homo sapiens
aattgtggatccagttacttg

SEQ ID NO: 20027 - RNA, 21 nt, RNAi-sense strand
uuguggauccaguuacuuguu

SEQ ID NO: 20028 - RNA, 21 nt, RNAi-antisense strand
caaguaacuggauccacaauu

SEQ ID NO: 20029 - DNA, 21 bp, Homo sapiens
aaattagctctggttgagata

SEQ ID NO: 20030 - RNA, 21 nt, RNAi-sense strand
auuagcucugguugagauauu

SEQ ID NO: 20031 - RNA, 21 nt, RNAi-antisense strand
uaucucaaccagagcuaauuu

SEQ ID NO: 20032 - DNA, 21 bp, Homo sapiens
aattagctctggttgagatat

SEQ ID NO: 20033 - RNA, 21 nt, RNAi-sense strand
uuagcucugguugagauauuu

SEQ ID NO: 20034 - RNA, 21 nt, RNAi-antisense strand
auaucucaaccagagcuaauu

SEQ ID NO: 20035 - DNA, 21 bp, Homo sapiens
aagtatggcaggtatttgaga

SEQ ID NO: 20036 - RNA, 21 nt, RNAi-sense strand
guauggcagguauuugagauu

SEQ ID NO: 20037 - RNA, 21 nt, RNAi-antisense strand
ucucaaauaccugccauacuu

SEQ ID NO: 20038 - DNA, 21 bp, Homo sapiens
cagaaatgctgtgccggctcg

SEQ ID NO: 20039 - RNA, 21 nt, RNAi-sense strand
gaaaugcugugccggcucguu

SEQ ID NO: 20040 - RNA, 21 nt, RNAi-antisense strand
cgagccggcacagcauuucuu

SEQ ID NO: 20041 - DNA, 21 bp, Homo sapiens
cagtggcaccagtctctgcag

SEQ ID NO: 20042 - RNA, 21 nt, RNAi-sense strand
guggcaccagucucugcaguu

SEQ ID NO: 20043 - RNA, 21 nt, RNAi-antisense strand
cugcagagacuggugccacuu

SEQ ID NO: 20044 - DNA, 21 bp, Homo sapiens
caccagtctctgcagtacatg

SEQ ID NO: 20045 - RNA, 21 nt, RNAi-sense strand
ccagucucugcaguacauguu

SEQ ID NO: 20046 - RNA, 21 nt, RNAi-antisense strand
cauguacugcagagacugguu

SEQ ID NO: 20047 - DNA, 21 bp, Homo sapiens
cagtctctgcagtacatgcga

SEQ ID NO: 20048 - RNA, 21 nt, RNAi-sense strand
gucucugcaguacaugcgauu

SEQ ID NO: 20049 - RNA, 21 nt, RNAi-antisense strand
ucgcauguacugcagagacuu

SEQ ID NO: 20050 - DNA, 21 bp, Homo sapiens
cagtacatgcgaacggctggt

SEQ ID NO: 20051 - RNA, 21 nt, RNAi-sense strand
guacaugcgaacggcugguuu

SEQ ID NO: 20052 - RNA, 21 nt, RNAi-antisense strand
accagccguucgcauguacuu

SEQ ID NO: 20053 - DNA, 21 bp, Homo sapiens
catgcgaacggctggtacgag

SEQ ID NO: 20054 - RNA, 21 nt, RNAi-sense strand
ugcgaacggcugguacgaguu

SEQ ID NO: 20055 - RNA, 21 nt, RNAi-antisense strand
cucguaccagccguucgcauu

SEQ ID NO: 20056 - DNA, 21 bp, Homo sapiens
cagcattctgctctccaccgt

SEQ ID NO: 20057 - RNA, 21 nt, RNAi-sense strand
gcauucugcucuccaccguuu

SEQ ID NO: 20058 - RNA, 21 nt, RNAi-antisense strand
acgguggagagcagaaugcuu

SEQ ID NO: 20059 - DNA, 21 bp, Homo sapiens
cattctgctctccaccgtggc

SEQ ID NO: 20060 - RNA, 21 nt, RNAi-sense strand
uucugcucuccaccguggcuu

SEQ ID NO: 20061 - RNA, 21 nt, RNAi-antisense strand
gccacgguggagagcagaauu

SEQ ID NO: 20062 - DNA, 21 bp, Homo sapiens
cacgctgcctttggcagccta

SEQ ID NO: 20063 - RNA, 21 nt, RNAi-sense strand
cgcugccuuuggcagccuauu

SEQ ID NO: 20064 - RNA, 21 nt, RNAi-antisense strand
uaggcugccaaaggcagcguu

SEQ ID NO: 20065 - DNA, 21 bp, Homo sapiens
cagcctaccagcactacatcc

SEQ ID NO: 20066 - RNA, 21 nt, RNAi-sense strand
gccuaccagcacuacauccuu

SEQ ID NO: 20067 - RNA, 21 nt, RNAi-antisense strand
ggauguagugcugguaggcuu

SEQ ID NO: 20068 - DNA, 21 bp, Homo sapiens
cagcactacatcctggccaag

SEQ ID NO: 20069 - RNA, 21 nt, RNAi-sense strand
gcacuacauccuggccaaguu

SEQ ID NO: 20070 - RNA, 21 nt, RNAi-antisense strand
cuuggccaggauguagugcuu

SEQ ID NO: 20071 - DNA, 21 bp, Homo sapiens
cactacatcctggccaaggtg

SEQ ID NO: 20072 - RNA, 21 nt, RNAi-sense strand
cuacauccuggccaagguguu

SEQ ID NO: 20073 - RNA, 21 nt, RNAi-antisense strand
caccuuggccaggauguaguu

SEQ ID NO: 20074 - DNA, 21 bp, Homo sapiens
caggcatcttaaccaagaagt

SEQ ID NO: 20075 - RNA, 21 nt, RNAi-sense strand
ggcaucuuaaccaagaaguuu

SEQ ID NO: 20076 - RNA, 21 nt, RNAi-antisense strand
acuucuugguuaagaugccuu

SEQ ID NO: 20077 - DNA, 21 bp, Homo sapiens
catcttaaccaagaagttgca

SEQ ID NO: 20078 - RNA, 21 nt, RNAi-sense strand
ucuuaaccaagaaguugcauu

SEQ ID NO: 20079 - RNA, 21 nt, RNAi-antisense strand
ugcaacuucuugguuaagauu

SEQ ID NO: 20080 - DNA, 21 bp, Homo sapiens
caagaagttgcagttcgtgca

SEQ ID NO: 20081 - RNA, 21 nt, RNAi-sense strand
agaaguugcaguucgugcauu

SEQ ID NO: 20082 - RNA, 21 nt, RNAi-antisense strand
ugcacgaacugcaacuucuuu

SEQ ID NO: 20083 - DNA, 21 bp, Homo sapiens
cagttcgtgcaaatcagttgg

SEQ ID NO: 20084 - RNA, 21 nt, RNAi-sense strand
guucgugcaaaucaguugguu

SEQ ID NO: 20085 - RNA, 21 nt, RNAi-antisense strand
ccaacugauuugcacgaacuu

SEQ ID NO: 20086 - DNA, 21 bp, Homo sapiens
caggctcacttatctaaagaa

SEQ ID NO: 20087 - RNA, 21 nt, RNAi-sense strand
ggcucacuuaucuaaagaauu

SEQ ID NO: 20088 - RNA, 21 nt, RNAi-antisense strand
uucuuuagauaagugagccuu

SEQ ID NO: 20089 - DNA, 21 bp, Homo sapiens
cagagctatatgtgcgagata

SEQ ID NO: 20090 - RNA, 21 nt, RNAi-sense strand
gagcuauaugugcgagauauu

SEQ ID NO: 20091 - RNA, 21 nt, RNAi-antisense strand
uaucucgcacauauagcucuu

SEQ ID NO: 20092 - DNA, 21 bp, Homo sapiens
caaagccactgtgttggtttg

SEQ ID NO: 20093 - RNA, 21 nt, RNAi-sense strand
aagccacuguguugguuuguu

SEQ ID NO: 20094 - RNA, 21 nt, RNAi-antisense strand
caaaccaacacaguggcuuuu

SEQ ID NO: 20095 - DNA, 21 bp, Homo sapiens
cactgtgttggtttggattca

SEQ ID NO: 20096 - RNA, 21 nt, RNAi-sense strand
cuguguugguuuggauucauu

SEQ ID NO: 20097 - RNA, 21 nt, RNAi-antisense strand
ugaauccaaaccaacacaguu

SEQ ID NO: 20098 - DNA, 21 bp, Homo sapiens
cagcttccaatgtggatcttc

SEQ ID NO: 20099 - RNA, 21 nt, RNAi-sense strand
gcuuccaauguggaucuucuu

SEQ ID NO: 20100 - RNA, 21 nt, RNAi-antisense strand
gaagauccacauuggaagcuu

SEQ ID NO: 20101 - DNA, 21 bp, Homo sapiens
caatgtggatcttcatgtctt

SEQ ID NO: 20102 - RNA, 21 nt, RNAi-sense strand
auguggaucuucaugucuuuu

SEQ ID NO: 20103 - RNA, 21 nt, RNAi-antisense strand
aagacaugaagauccacauuu

SEQ ID NO: 20104 - DNA, 21 bp, Homo sapiens
caggaacagttagctactggt

SEQ ID NO: 20105 - RNA, 21 nt, RNAi-sense strand
ggaacaguuagcuacugguuu

SEQ ID NO: 20106 - RNA, 21 nt, RNAi-antisense strand
accaguagcuaacuguuccuu

SEQ ID NO: 20107 - DNA, 21 bp, Homo sapiens
cagttagctactggtggaatt

SEQ ID NO: 20108 - RNA, 21 nt, RNAi-sense strand
guuagcuacugguggaauuuu

SEQ ID NO: 20109 - RNA, 21 nt, RNAi-antisense strand
aauuccaccaguagcuaacuu

SEQ ID NO: 20110 - DNA, 21 bp, Homo sapiens
cactgcacctgactccacttg

SEQ ID NO: 20111 - RNA, 21 nt, RNAi-sense strand
cugcaccugacuccacuuguu

SEQ ID NO: 20112 - RNA, 21 nt, RNAi-antisense strand
caaguggagucaggugcaguu

SEQ ID NO: 20113 - DNA, 21 bp, Homo sapiens
cacctgactccacttggattc

SEQ ID NO: 20114 - RNA, 21 nt, RNAi-sense strand
ccugacuccacuuggauucuu

SEQ ID NO: 20115 - RNA, 21 nt, RNAi-antisense strand
gaauccaaguggagucagguu

SEQ ID NO: 20116 - DNA, 21 bp, Homo sapiens
cacttggattctgcctatctc

SEQ ID NO: 20117 - RNA, 21 nt, RNAi-sense strand
cuuggauucugccuaucucuu

SEQ ID NO: 20118 - RNA, 21 nt, RNAi-antisense strand
gagauaggcagaauccaaguu

SEQ ID NO: 20119 - DNA, 21 bp, Homo sapiens
cagacgtatattacgtacttt

SEQ ID NO: 20120 - RNA, 21 nt, RNAi-sense strand
gacguauauuacguacuuuuu

SEQ ID NO: 20121 - RNA, 21 nt, RNAi-antisense strand
aaaguacguaauauacgucuu

SEQ ID NO: 20122 - DNA, 21 bp, Homo sapiens
caatgtcggtgttgatgatac

SEQ ID NO: 20123 - RNA, 21 nt, RNAi-sense strand
augucgguguugaugauacuu

SEQ ID NO: 20124 - RNA, 21 nt, RNAi-antisense strand
guaucaucaacaccgacauuu

SEQ ID NO: 20125 - DNA, 21 bp, Homo sapiens
catcaattgttctctactggt

SEQ ID NO: 20126 - RNA, 21 nt, RNAi-sense strand
ucaauuguucucuacugguuu

SEQ ID NO: 20127 - RNA, 21 nt, RNAi-antisense strand
accaguagagaacaauugauu

SEQ ID NO: 20128 - DNA, 21 bp, Homo sapiens
caattgttctctactggttat

SEQ ID NO: 20129 - RNA, 21 nt, RNAi-sense strand
auuguucucuacugguuauuu

SEQ ID NO: 20130 - RNA, 21 nt, RNAi-antisense strand
auaaccaguagagaacaauuu

SEQ ID NO: 20131 - DNA, 21 bp, Homo sapiens
cacagaatttgctgctgcgtt

SEQ ID NO: 20132 - RNA, 21 nt, RNAi-sense strand
cagaauuugcugcugcguuuu

SEQ ID NO: 20133 - RNA, 21 nt, RNAi-antisense strand
aacgcagcagcaaauucuguu

SEQ ID NO: 20134 - DNA, 21 bp, Homo sapiens
cagaatttgctgctgcgttct

SEQ ID NO: 20135 - RNA, 21 nt, RNAi-sense strand
gaauuugcugcugcguucuuu

SEQ ID NO: 20136 - RNA, 21 nt, RNAi-antisense strand
agaacgcagcagcaaauucuu

SEQ ID NO: 20137 - DNA, 21 bp, Homo sapiens
caactttgccgaataccatcg

SEQ ID NO: 20138 - RNA, 21 nt, RNAi-sense strand
acuuugccgaauaccaucguu

SEQ ID NO: 20139 - RNA, 21 nt, RNAi-antisense strand
cgaugguauucggcaaaguuu

SEQ ID NO: 20140 - DNA, 21 bp, Homo sapiens
catcgaccaagtcagattcag

SEQ ID NO: 20141 - RNA, 21 nt, RNAi-sense strand
ucgaccaagucagauucaguu

SEQ ID NO: 20142 - RNA, 21 nt, RNAi-antisense strand
cugaaucugacuuggucgauu

SEQ ID NO: 20143 - DNA, 21 bp, Homo sapiens
caagtcagattcagaaactcc

SEQ ID NO: 20144 - RNA, 21 nt, RNAi-sense strand
agucagauucagaaacuccuu

SEQ ID NO: 20145 - RNA, 21 nt, RNAi-antisense strand
ggaguuucugaaucugacuuu

SEQ ID NO: 20146 - DNA, 21 bp, Homo sapiens
cagattcagaaactccttata

SEQ ID NO: 20147 - RNA, 21 nt, RNAi-sense strand
gauucagaaacuccuuauauu

SEQ ID NO: 20148 - RNA, 21 nt, RNAi-antisense strand
uauaaggaguuucugaaucuu

SEQ ID NO: 20149 - DNA, 21 bp, Homo sapiens
cagaaactccttataaagaca

SEQ ID NO: 20150 - RNA, 21 nt, RNAi-sense strand
gaaacuccuuauaaagacauu

SEQ ID NO: 20151 - RNA, 21 nt, RNAi-antisense strand
ugucuuuauaaggaguuucuu

SEQ ID NO: 20152 - DNA, 21 bp, Homo sapiens
catatttgctgcctttaatac

SEQ ID NO: 20153 - RNA, 21 nt, RNAi-sense strand
uauuugcugccuuuaauacuu

SEQ ID NO: 20154 - RNA, 21 nt, RNAi-antisense strand
guauuaaaggcagcaaauauu

SEQ ID NO: 20155 - DNA, 21 bp, Homo sapiens
cagttgcaggagtcactatca

SEQ ID NO: 20156 - RNA, 21 nt, RNAi-sense strand
guugcaggagucacuaucauu

SEQ ID NO: 20157 - RNA, 21 nt, RNAi-antisense strand
ugauagugacuccugcaacuu

SEQ ID NO: 20158 - DNA, 21 bp, Homo sapiens
caggagtcactatcatctaaa

SEQ ID NO: 20159 - RNA, 21 nt, RNAi-sense strand
ggagucacuaucaucuaaauu

SEQ ID NO: 20160 - RNA, 21 nt, RNAi-antisense strand
uuuagaugauagugacuccuu

SEQ ID NO: 20161 - DNA, 21 bp, Homo sapiens
cagatgttacttgatttcctt

SEQ ID NO: 20162 - RNA, 21 nt, RNAi-sense strand
gauguuacuugauuuccuuuu

SEQ ID NO: 20163 - RNA, 21 nt, RNAi-antisense strand
aaggaaaucaaguaacaucuu

SEQ ID NO: 20164 - DNA, 21 bp, Homo sapiens
cagaccaggcacagtggctca

SEQ ID NO: 20165 - RNA, 21 nt, RNAi-sense strand
gaccaggcacaguggcucauu

SEQ ID NO: 20166 - RNA, 21 nt, RNAi-antisense strand
ugagccacugugccuggucuu

SEQ ID NO: 20167 - DNA, 21 bp, Homo sapiens
caggcacagtggctcatgcct

SEQ ID NO: 20168 - RNA, 21 nt, RNAi-sense strand
ggcacaguggcucaugccuuu

SEQ ID NO: 20169 - RNA, 21 nt, RNAi-antisense strand
aggcaugagccacugugccuu

SEQ ID NO: 20170 - DNA, 21 bp, Homo sapiens
cacagtggctcatgcctgtaa

SEQ ID NO: 20171 - RNA, 21 nt, RNAi-sense strand
caguggcucaugccuguaauu

SEQ ID NO: 20172 - RNA, 21 nt, RNAi-antisense strand
uuacaggcaugagccacuguu

SEQ ID NO: 20173 - DNA, 21 bp, Homo sapiens
cagtggctcatgcctgtaatc

SEQ ID NO: 20174 - RNA, 21 nt, RNAi-sense strand
guggcucaugccuguaaucuu

SEQ ID NO: 20175 - RNA, 21 nt, RNAi-antisense strand
gauuacaggcaugagccacuu

SEQ ID NO: 20176 - DNA, 21 bp, Homo sapiens
cacctgaggtctggagtttga

SEQ ID NO: 20177 - RNA, 21 nt, RNAi-sense strand
ccugaggucuggaguuugauu

SEQ ID NO: 20178 - RNA, 21 nt, RNAi-antisense strand
ucaaacuccagaccucagguu

SEQ ID NO: 20179 - DNA, 21 bp, Homo sapiens
cagcctggccaacatggtgaa

SEQ ID NO: 20180 - RNA, 21 nt, RNAi-sense strand
gccuggccaacauggugaauu

SEQ ID NO: 20181 - RNA, 21 nt, RNAi-antisense strand
uucaccauguuggccaggcuu

SEQ ID NO: 20182 - DNA, 21 bp, Homo sapiens
caggagaatcgcttgaacctg

SEQ ID NO: 20183 - RNA, 21 nt, RNAi-sense strand
ggagaaucgcuugaaccuguu

SEQ ID NO: 20184 - RNA, 21 nt, RNAi-antisense strand
cagguucaagcgauucuccuu

SEQ ID NO: 20185 - DNA, 21 bp, Homo sapiens
cagaggtttcagtgagctgag

SEQ ID NO: 20186 - RNA, 21 nt, RNAi-sense strand
gagguuucagugagcugaguu

SEQ ID NO: 20187 - RNA, 21 nt, RNAi-antisense strand
cucagcucacugaaaccucuu

SEQ ID NO: 20188 - DNA, 21 bp, Homo sapiens
cattgcactccagcctggaca

SEQ ID NO: 20189 - RNA, 21 nt, RNAi-sense strand
uugcacuccagccuggacauu

SEQ ID NO: 20190 - RNA, 21 nt, RNAi-antisense strand
uguccaggcuggagugcaauu

SEQ ID NO: 20191 - DNA, 21 bp, Homo sapiens
cactccagcctggacaacaag

SEQ ID NO: 20192 - RNA, 21 nt, RNAi-sense strand
cuccagccuggacaacaaguu

SEQ ID NO: 20193 - RNA, 21 nt, RNAi-antisense strand
cuuguuguccaggcuggaguu

SEQ ID NO: 20194 - DNA, 21 bp, Homo sapiens
cagcctggacaacaagagtga

SEQ ID NO: 20195 - RNA, 21 nt, RNAi-sense strand
gccuggacaacaagagugauu

SEQ ID NO: 20196 - RNA, 21 nt, RNAi-antisense strand
ucacucuuguuguccaggcuu

SEQ ID NO: 20197 - DNA, 21 bp, Homo sapiens
caacaagagtgaaacgctatc

SEQ ID NO: 20198 - RNA, 21 nt, RNAi-sense strand
acaagagugaaacgcuaucuu

SEQ ID NO: 20199 - RNA, 21 nt, RNAi-antisense strand
gauagcguuucacucuuguuu

SEQ ID NO: 20200 - DNA, 21 bp, Homo sapiens
caagagtgaaacgctatcaaa

SEQ ID NO: 20201 - RNA, 21 nt, RNAi-sense strand
agagugaaacgcuaucaaauu

SEQ ID NO: 20202 - RNA, 21 nt, RNAi-antisense strand
uuugauagcguuucacucuuu

SEQ ID NO: 20203 - DNA, 21 bp, Homo sapiens
caaagtgcctgtctctgttta

SEQ ID NO: 20204 - RNA, 21 nt, RNAi-sense strand
aagugccugucucuguuuauu

SEQ ID NO: 20205 - RNA, 21 nt, RNAi-antisense strand
uaaacagagacaggcacuuuu

SEQ ID NO: 20206 - DNA, 21 bp, Homo sapiens
cagtttgttagagctaccaga

SEQ ID NO: 20207 - RNA, 21 nt, RNAi-sense strand
guuuguuagagcuaccagauu

SEQ ID NO: 20208 - RNA, 21 nt, RNAi-antisense strand
ucugguagcucuaacaaacuu

SEQ ID NO: 20209 - DNA, 21 bp, Homo sapiens
cagtggcgcaatctcagctca

SEQ ID NO: 20210 - RNA, 21 nt, RNAi-sense strand
guggcgcaaucucagcucauu

SEQ ID NO: 20211 - RNA, 21 nt, RNAi-antisense strand
ugagcugagauugcgccacuu

SEQ ID NO: 20212 - DNA, 21 bp, Homo sapiens
caatctcagctcactgcaacc

SEQ ID NO: 20213 - RNA, 21 nt, RNAi-sense strand
aucucagcucacugcaaccuu

SEQ ID NO: 20214 - RNA, 21 nt, RNAi-antisense strand
gguugcagugagcugagauuu

SEQ ID NO: 20215 - DNA, 21 bp, Homo sapiens
cagctcactgcaacctccatc

SEQ ID NO: 20216 - RNA, 21 nt, RNAi-sense strand
gcucacugcaaccuccaucuu

SEQ ID NO: 20217 - RNA, 21 nt, RNAi-antisense strand
gauggagguugcagugagcuu

SEQ ID NO: 20218 - DNA, 21 bp, Homo sapiens
caccatgttggacaggctggt

SEQ ID NO: 20219 - RNA, 21 nt, RNAi-sense strand
ccauguuggacaggcugguuu

SEQ ID NO: 20220 - RNA, 21 nt, RNAi-antisense strand
accagccuguccaacaugguu

SEQ ID NO: 20221 - DNA, 21 bp, Homo sapiens
catgttggacaggctggtctg

SEQ ID NO: 20222 - RNA, 21 nt, RNAi-sense strand
uguuggacaggcuggucuguu

SEQ ID NO: 20223 - RNA, 21 nt, RNAi-antisense strand
cagaccagccuguccaacauu

SEQ ID NO: 20224 - DNA, 21 bp, Homo sapiens
caggctggtctggaactgctg

SEQ ID NO: 20225 - RNA, 21 nt, RNAi-sense strand
ggcuggucuggaacugcuguu

SEQ ID NO: 20226 - RNA, 21 nt, RNAi-antisense strand
cagcaguuccagaccagccuu

SEQ ID NO: 20227 - DNA, 21 bp, Homo sapiens
cagagtctctctctgtcacct

SEQ ID NO: 20228 - RNA, 21 nt, RNAi-sense strand
gagucucucucugucaccuuu

SEQ ID NO: 20229 - RNA, 21 nt, RNAi-antisense strand
aggugacagagagagacucuu

SEQ ID NO: 20230 - DNA, 21 bp, Homo sapiens
cacctaggctggagtgcagtg

SEQ ID NO: 20231 - RNA, 21 nt, RNAi-sense strand
ccuaggcuggagugcaguguu

SEQ ID NO: 20232 - RNA, 21 nt, RNAi-antisense strand
cacugcacuccagccuagguu

SEQ ID NO: 20233 - DNA, 21 bp, Homo sapiens
cagtggcacgatctcggctca

SEQ ID NO: 20234 - RNA, 21 nt, RNAi-sense strand
guggcacgaucucggcucauu

SEQ ID NO: 20235 - RNA, 21 nt, RNAi-antisense strand
ugagccgagaucgugccacuu

SEQ ID NO: 20236 - DNA, 21 bp, Homo sapiens
cacgatctcggctcactgcaa

SEQ ID NO: 20237 - RNA, 21 nt, RNAi-sense strand
cgaucucggcucacugcaauu

SEQ ID NO: 20238 - RNA, 21 nt, RNAi-antisense strand
uugcagugagccgagaucguu

SEQ ID NO: 20239 - DNA, 21 bp, Homo sapiens
caagcaattctcctacctcag

SEQ ID NO: 20240 - RNA, 21 nt, RNAi-sense strand
agcaauucuccuaccucaguu

SEQ ID NO: 20241 - RNA, 21 nt, RNAi-antisense strand
cugagguaggagaauugcuuu

SEQ ID NO: 20242 - DNA, 21 bp, Homo sapiens
caattctcctacctcagccta

SEQ ID NO: 20243 - RNA, 21 nt, RNAi-sense strand
auucuccuaccucagccuauu

SEQ ID NO: 20244 - RNA, 21 nt, RNAi-antisense strand
uaggcugagguaggagaauuu

SEQ ID NO: 20245 - DNA, 21 bp, Homo sapiens
caccatgttggctaggctggt

SEQ ID NO: 20246 - RNA, 21 nt, RNAi-sense strand
ccauguuggcuaggcugguuu

SEQ ID NO: 20247 - RNA, 21 nt, RNAi-antisense strand
accagccuagccaacaugguu

SEQ ID NO: 20248 - DNA, 21 bp, Homo sapiens
catgttggctaggctggtctt

SEQ ID NO: 20249 - RNA, 21 nt, RNAi-sense strand
uguuggcuaggcuggucuuuu

SEQ ID NO: 20250 - RNA, 21 nt, RNAi-antisense strand
aagaccagccuagccaacauu

SEQ ID NO: 20251 - DNA, 21 bp, Homo sapiens
cagctgagatgtttcttatta

SEQ ID NO: 20252 - RNA, 21 nt, RNAi-sense strand
gcugagauguuucuuauuauu

SEQ ID NO: 20253 - RNA, 21 nt, RNAi-antisense strand
uaauaagaaacaucucagcuu

SEQ ID NO: 20254 - DNA, 21 bp, Homo sapiens
cattgatcttgagttaatgcg

SEQ ID NO: 20255 - RNA, 21 nt, RNAi-sense strand
uugaucuugaguuaaugcguu

SEQ ID NO: 20256 - RNA, 21 nt, RNAi-antisense strand
cgcauuaacucaagaucaauu

SEQ ID NO: 20257 - DNA, 21 bp, Homo sapiens
cagtaaagtagtccatgcata

SEQ ID NO: 20258 - RNA, 21 nt, RNAi-sense strand
guaaaguaguccaugcauauu

SEQ ID NO: 20259 - RNA, 21 nt, RNAi-antisense strand
uaugcauggacuacuuuacuu

SEQ ID NO: 20260 - DNA, 21 bp, Homo sapiens
catggtagatgatgttgcctc

SEQ ID NO: 20261 - RNA, 21 nt, RNAi-sense strand
ugguagaugauguugccucuu

SEQ ID NO: 20262 - RNA, 21 nt, RNAi-antisense strand
gaggcaacaucaucuaccauu

SEQ ID NO: 20263 - DNA, 21 bp, Homo sapiens
cagagtgtaacactgtgtact

SEQ ID NO: 20264 - RNA, 21 nt, RNAi-sense strand
gaguguaacacuguguacuuu

SEQ ID NO: 20265 - RNA, 21 nt, RNAi-antisense strand
aguacacaguguuacacucuu

SEQ ID NO: 20266 - DNA, 21 bp, Homo sapiens
cagattgtttagtcaaagaag

SEQ ID NO: 20267 - RNA, 21 nt, RNAi-sense strand
gauuguuuagucaaagaaguu

SEQ ID NO: 20268 - RNA, 21 nt, RNAi-antisense strand
cuucuuugacuaaacaaucuu

SEQ ID NO: 20269 - DNA, 21 bp, Homo sapiens
cagttgcctattgaggtgatt

SEQ ID NO: 20270 - RNA, 21 nt, RNAi-sense strand
guugccuauugaggugauuuu

SEQ ID NO: 20271 - RNA, 21 nt, RNAi-antisense strand
aaucaccucaauaggcaacuu

SEQ ID NO: 20272 - DNA, 21 bp, Homo sapiens
caagtatggcaggtatttgag

SEQ ID NO: 20273 - RNA, 21 nt, RNAi-sense strand
aguauggcagguauuugaguu

SEQ ID NO: 20274 - RNA, 21 nt, RNAi-antisense strand
cucaaauaccugccauacuuu

SEQ ID NO: 20275 - DNA, 21 bp, Homo sapiens
caggtatttgagaaggctata

SEQ ID NO: 20276 - RNA, 21 nt, RNAi-sense strand
gguauuugagaaggcuauauu

SEQ ID NO: 20277 - RNA, 21 nt, RNAi-antisense strand
uauagccuucucaaauaccuu

SEQ ID NO: 20278 - DNA, 21 bp, Homo sapiens
gaggaagtactgctcggcgtg

SEQ ID NO: 20279 - RNA, 21 nt, RNAi-sense strand
ggaaguacugcucggcguguu

SEQ ID NO: 20280 - RNA, 21 nt, RNAi-antisense strand
cacgccgagcaguacuuccuu

SEQ ID NO: 20281 - DNA, 21 bp, Homo sapiens
gaagtactgctcggcgtgcac

SEQ ID NO: 20282 - RNA, 21 nt, RNAi-sense strand
aguacugcucggcgugcacuu

SEQ ID NO: 20283 - RNA, 21 nt, RNAi-antisense strand
gugcacgccgagcaguacuuu

SEQ ID NO: 20284 - DNA, 21 bp, Homo sapiens
gaagttgcagttcgtgcaaat

SEQ ID NO: 20285 - RNA, 21 nt, RNAi-sense strand
aguugcaguucgugcaaauuu

SEQ ID NO: 20286 - RNA, 21 nt, RNAi-antisense strand
auuugcacgaacugcaacuuu

SEQ ID NO: 20287 - DNA, 21 bp, Homo sapiens
gagatgccaggctcacttatc

SEQ ID NO: 20288 - RNA, 21 nt, RNAi-sense strand
gaugccaggcucacuuaucuu

SEQ ID NO: 20289 - RNA, 21 nt, RNAi-antisense strand
gauaagugagccuggcaucuu

SEQ ID NO: 20290 - DNA, 21 bp, Homo sapiens
gatgccaggctcacttatcta

SEQ ID NO: 20291 - RNA, 21 nt, RNAi-sense strand
ugccaggcucacuuaucuauu

SEQ ID NO: 20292 - RNA, 21 nt, RNAi-antisense strand
uagauaagugagccuggcauu

SEQ ID NO: 20293 - DNA, 21 bp, Homo sapiens
gaatatgaggaggctaatttc

SEQ ID NO: 20294 - RNA, 21 nt, RNAi-sense strand
auaugaggaggcuaauuucuu

SEQ ID NO: 20295 - RNA, 21 nt, RNAi-antisense strand
gaaauuagccuccucauauuu

SEQ ID NO: 20296 - DNA, 21 bp, Homo sapiens
gaggaggctaatttcagagct

SEQ ID NO: 20297 - RNA, 21 nt, RNAi-sense strand
ggaggcuaauuucagagcuuu

SEQ ID NO: 20298 - RNA, 21 nt, RNAi-antisense strand
agcucugaaauuagccuccuu

SEQ ID NO: 20299 - DNA, 21 bp, Homo sapiens
gaggctaatttcagagctata

SEQ ID NO: 20300 - RNA, 21 nt, RNAi-sense strand
ggcuaauuucagagcuauauu

SEQ ID NO: 20301 - RNA, 21 nt, RNAi-antisense strand
uauagcucugaaauuagccuu

SEQ ID NO: 20302 - DNA, 21 bp, Homo sapiens
gagctatatgtgcgagataac

SEQ ID NO: 20303 - RNA, 21 nt, RNAi-sense strand
gcuauaugugcgagauaacuu

SEQ ID NO: 20304 - RNA, 21 nt, RNAi-antisense strand
guuaucucgcacauauagcuu

SEQ ID NO: 20305 - DNA, 21 bp, Homo sapiens
gattcagcttccaatgtggat

SEQ ID NO: 20306 - RNA, 21 nt, RNAi-sense strand
uucagcuuccaauguggauuu

SEQ ID NO: 20307 - RNA, 21 nt, RNAi-antisense strand
auccacauuggaagcugaauu

SEQ ID NO: 20308 - DNA, 21 bp, Homo sapiens
gaacagttagctactggtgga

SEQ ID NO: 20309 - RNA, 21 nt, RNAi-sense strand
acaguuagcuacugguggauu

SEQ ID NO: 20310 - RNA, 21 nt, RNAi-antisense strand
uccaccaguagcuaacuguuu

SEQ ID NO: 20311 - DNA, 21 bp, Homo sapiens
gaattctgtggtttcctgacc

SEQ ID NO: 20312 - RNA, 21 nt, RNAi-sense strand
auucugugguuuccugaccuu

SEQ ID NO: 20313 - RNA, 21 nt, RNAi-antisense strand
ggucaggaaaccacagaauuu

SEQ ID NO: 20314 - DNA, 21 bp, Homo sapiens
gacctcactgcacctgactcc

SEQ ID NO: 20315 - RNA, 21 nt, RNAi-sense strand
ccucacugcaccugacuccuu

SEQ ID NO: 20316 - RNA, 21 nt, RNAi-antisense strand
ggagucaggugcagugagguu

SEQ ID NO: 20317 - DNA, 21 bp, Homo sapiens
gactccacttggattctgcct

SEQ ID NO: 20318 - RNA, 21 nt, RNAi-sense strand
cuccacuuggauucugccuuu

SEQ ID NO: 20319 - RNA, 21 nt, RNAi-antisense strand
aggcagaauccaaguggaguu

SEQ ID NO: 20320 - DNA, 21 bp, Homo sapiens
gattctgcctatctctgttgg

SEQ ID NO: 20321 - RNA, 21 nt, RNAi-sense strand
uucugccuaucucuguugguu

SEQ ID NO: 20322 - RNA, 21 nt, RNAi-antisense strand
ccaacagagauaggcagaauu

SEQ ID NO: 20323 - DNA, 21 bp, Homo sapiens
gacgtatattacgtactttgt

SEQ ID NO: 20324 - RNA, 21 nt, RNAi-sense strand
cguauauuacguacuuuguuu

SEQ ID NO: 20325 - RNA, 21 nt, RNAi-antisense strand
acaaaguacguaauauacguu

SEQ ID NO: 20326 - DNA, 21 bp, Homo sapiens
gatgataccaattgctgcaac

SEQ ID NO: 20327 - RNA, 21 nt, RNAi-sense strand
ugauaccaauugcugcaacuu

SEQ ID NO: 20328 - RNA, 21 nt, RNAi-antisense strand
guugcagcaauugguaucauu

SEQ ID NO: 20329 - DNA, 21 bp, Homo sapiens
gataccaattgctgcaacggt

SEQ ID NO: 20330 - RNA, 21 nt, RNAi-sense strand
uaccaauugcugcaacgguuu

SEQ ID NO: 20331 - RNA, 21 nt, RNAi-antisense strand
accguugcagcaauugguauu

SEQ ID NO: 20332 - DNA, 21 bp, Homo sapiens
gaatttgctgctgcgttctcc

SEQ ID NO: 20333 - RNA, 21 nt, RNAi-sense strand
auuugcugcugcguucuccuu

SEQ ID NO: 20334 - RNA, 21 nt, RNAi-antisense strand
ggagaacgcagcagcaaauuu

SEQ ID NO: 20335 - DNA, 21 bp, Homo sapiens
gatttcgccaactttgccgaa

SEQ ID NO: 20336 - RNA, 21 nt, RNAi-sense strand
uuucgccaacuuugccgaauu

SEQ ID NO: 20337 - RNA, 21 nt, RNAi-antisense strand
uucggcaaaguuggcgaaauu

SEQ ID NO: 20338 - DNA, 21 bp, Homo sapiens
gaataccatcgaccaagtcag

SEQ ID NO: 20339 - RNA, 21 nt, RNAi-sense strand
auaccaucgaccaagucaguu

SEQ ID NO: 20340 - RNA, 21 nt, RNAi-antisense strand
cugacuuggucgaugguauuu

SEQ ID NO: 20341 - DNA, 21 bp, Homo sapiens
gaccaagtcagattcagaaac

SEQ ID NO: 20342 - RNA, 21 nt, RNAi-sense strand
ccaagucagauucagaaacuu

SEQ ID NO: 20343 - RNA, 21 nt, RNAi-antisense strand
guuucugaaucugacuugguu

SEQ ID NO: 20344 - DNA, 21 bp, Homo sapiens
gacatatttgctgcctttaat

SEQ ID NO: 20345 - RNA, 21 nt, RNAi-sense strand
cauauuugcugccuuuaauuu

SEQ ID NO: 20346 - RNA, 21 nt, RNAi-antisense strand
auuaaaggcagcaaauauguu

SEQ ID NO: 20347 - DNA, 21 bp, Homo sapiens
gaaacagttgcaggagtcact

SEQ ID NO: 20348 - RNA, 21 nt, RNAi-sense strand
aacaguugcaggagucacuuu

SEQ ID NO: 20349 - RNA, 21 nt, RNAi-antisense strand
agugacuccugcaacuguuuu

SEQ ID NO: 20350 - DNA, 21 bp, Homo sapiens
gagtcactatcatctaaatgt

SEQ ID NO: 20351 - RNA, 21 nt, RNAi-sense strand
gucacuaucaucuaaauguuu

SEQ ID NO: 20352 - RNA, 21 nt, RNAi-antisense strand
acauuuagaugauagugacuu

SEQ ID NO: 20353 - DNA, 21 bp, Homo sapiens
gatgtaatccagaccaggcac

SEQ ID NO: 20354 - RNA, 21 nt, RNAi-sense strand
uguaauccagaccaggcacuu

SEQ ID NO: 20355 - RNA, 21 nt, RNAi-antisense strand
gugccuggucuggauuacauu

SEQ ID NO: 20356 - DNA, 21 bp, Homo sapiens
gaccaggcacagtggctcatg

SEQ ID NO: 20357 - RNA, 21 nt, RNAi-sense strand
ccaggcacaguggcucauguu

SEQ ID NO: 20358 - RNA, 21 nt, RNAi-antisense strand
caugagccacugugccugguu

SEQ ID NO: 20359 - DNA, 21 bp, Homo sapiens
gatcacctgaggtctggagtt

SEQ ID NO: 20360 - RNA, 21 nt, RNAi-sense strand
ucaccugaggucuggaguuuu

SEQ ID NO: 20361 - RNA, 21 nt, RNAi-antisense strand
aacuccagaccucaggugauu

SEQ ID NO: 20362 - DNA, 21 bp, Homo sapiens
gaggtctggagtttgagacca

SEQ ID NO: 20363 - RNA, 21 nt, RNAi-sense strand
ggucuggaguuugagaccauu

SEQ ID NO: 20364 - RNA, 21 nt, RNAi-antisense strand
uggucucaaacuccagaccuu

SEQ ID NO: 20365 - DNA, 21 bp, Homo sapiens
gagtttgagaccagcctggcc

SEQ ID NO: 20366 - RNA, 21 nt, RNAi-sense strand
guuugagaccagccuggccuu

SEQ ID NO: 20367 - RNA, 21 nt, RNAi-antisense strand
ggccaggcuggucucaaacuu

SEQ ID NO: 20368 - DNA, 21 bp, Homo sapiens
gagaccagcctggccaacatg

SEQ ID NO: 20369 - RNA, 21 nt, RNAi-sense strand
gaccagccuggccaacauguu

SEQ ID NO: 20370 - RNA, 21 nt, RNAi-antisense strand
cauguuggccaggcuggucuu

SEQ ID NO: 20371 - DNA, 21 bp, Homo sapiens
gaccagcctggccaacatggt

SEQ ID NO: 20372 - RNA, 21 nt, RNAi-sense strand
ccagccuggccaacaugguuu

SEQ ID NO: 20373 - RNA, 21 nt, RNAi-antisense strand
accauguuggccaggcugguu

SEQ ID NO: 20374 - DNA, 21 bp, Homo sapiens
gaggctgaggcaggagaatcg

SEQ ID NO: 20375 - RNA, 21 nt, RNAi-sense strand
ggcugaggcaggagaaucguu

SEQ ID NO: 20376 - RNA, 21 nt, RNAi-antisense strand
cgauucuccugccucagccuu

SEQ ID NO: 20377 - DNA, 21 bp, Homo sapiens
gaggcaggagaatcgcttgaa

SEQ ID NO: 20378 - RNA, 21 nt, RNAi-sense strand
ggcaggagaaucgcuugaauu

SEQ ID NO: 20379 - RNA, 21 nt, RNAi-antisense strand
uucaagcgauucuccugccuu

SEQ ID NO: 20380 - DNA, 21 bp, Homo sapiens
gagaatcgcttgaacctggaa

SEQ ID NO: 20381 - RNA, 21 nt, RNAi-sense strand
gaaucgcuugaaccuggaauu

SEQ ID NO: 20382 - RNA, 21 nt, RNAi-antisense strand
uuccagguucaagcgauucuu

SEQ ID NO: 20383 - DNA, 21 bp, Homo sapiens
gaatcgcttgaacctggaata

SEQ ID NO: 20384 - RNA, 21 nt, RNAi-sense strand
aucgcuugaaccuggaauauu

SEQ ID NO: 20385 - RNA, 21 nt, RNAi-antisense strand
uauuccagguucaagcgauuu

SEQ ID NO: 20386 - DNA, 21 bp, Homo sapiens
gaacctggaatacagaggttt

SEQ ID NO: 20387 - RNA, 21 nt, RNAi-sense strand
accuggaauacagagguuuuu

SEQ ID NO: 20388 - RNA, 21 nt, RNAi-antisense strand
aaaccucuguauuccagguuu

SEQ ID NO: 20389 - DNA, 21 bp, Homo sapiens
gaatacagaggtttcagtgag

SEQ ID NO: 20390 - RNA, 21 nt, RNAi-sense strand
auacagagguuucagugaguu

SEQ ID NO: 20391 - RNA, 21 nt, RNAi-antisense strand
cucacugaaaccucuguauuu

SEQ ID NO: 20392 - DNA, 21 bp, Homo sapiens
gaggtttcagtgagctgagat

SEQ ID NO: 20393 - RNA, 21 nt, RNAi-sense strand
gguuucagugagcugagauuu

SEQ ID NO: 20394 - RNA, 21 nt, RNAi-antisense strand
aucucagcucacugaaaccuu

SEQ ID NO: 20395 - DNA, 21 bp, Homo sapiens
gacaacaagagtgaaacgcta

SEQ ID NO: 20396 - RNA, 21 nt, RNAi-sense strand
caacaagagugaaacgcuauu

SEQ ID NO: 20397 - RNA, 21 nt, RNAi-antisense strand
uagcguuucacucuuguuguu

SEQ ID NO: 20398 - DNA, 21 bp, Homo sapiens
gagtgaaacgctatcaaagaa

SEQ ID NO: 20399 - RNA, 21 nt, RNAi-sense strand
gugaaacgcuaucaaagaauu

SEQ ID NO: 20400 - RNA, 21 nt, RNAi-antisense strand
uucuuugauagcguuucacuu

SEQ ID NO: 20401 - DNA, 21 bp, Homo sapiens
gaatagaaccaaagtgcctgt

SEQ ID NO: 20402 - RNA, 21 nt, RNAi-sense strand
auagaaccaaagugccuguuu

SEQ ID NO: 20403 - RNA, 21 nt, RNAi-antisense strand
acaggcacuuugguucuauuu

SEQ ID NO: 20404 - DNA, 21 bp, Homo sapiens
gaaccaaagtgcctgtctctg

SEQ ID NO: 20405 - RNA, 21 nt, RNAi-sense strand
accaaagugccugucucuguu

SEQ ID NO: 20406 - RNA, 21 nt, RNAi-antisense strand
cagagacaggcacuuugguuu

SEQ ID NO: 20407 - DNA, 21 bp, Homo sapiens
gagctaccagaactttggaga

SEQ ID NO: 20408 - RNA, 21 nt, RNAi-sense strand
gcuaccagaacuuuggagauu

SEQ ID NO: 20409 - RNA, 21 nt, RNAi-antisense strand
ucuccaaaguucugguagcuu

SEQ ID NO: 20410 - DNA, 21 bp, Homo sapiens
gaatgatggcaagttaaacta

SEQ ID NO: 20411 - RNA, 21 nt, RNAi-sense strand
augauggcaaguuaaacuauu

SEQ ID NO: 20412 - RNA, 21 nt, RNAi-antisense strand
uaguuuaacuugccaucauuu

SEQ ID NO: 20413 - DNA, 21 bp, Homo sapiens
gatggcaagttaaactaaaca

SEQ ID NO: 20414 - RNA, 21 nt, RNAi-sense strand
uggcaaguuaaacuaaacauu

SEQ ID NO: 20415 - RNA, 21 nt, RNAi-antisense strand
uguuuaguuuaacuugccauu

SEQ ID NO: 20416 - DNA, 21 bp, Homo sapiens
gaggatcagtgagatgattca

SEQ ID NO: 20417 - RNA, 21 nt, RNAi-sense strand
ggaucagugagaugauucauu

SEQ ID NO: 20418 - RNA, 21 nt, RNAi-antisense strand
ugaaucaucucacugauccuu

SEQ ID NO: 20419 - DNA, 21 bp, Homo sapiens
gatcagtgagatgattcatgt

SEQ ID NO: 20420 - RNA, 21 nt, RNAi-sense strand
ucagugagaugauucauguuu

SEQ ID NO: 20421 - RNA, 21 nt, RNAi-antisense strand
acaugaaucaucucacugauu

SEQ ID NO: 20422 - DNA, 21 bp, Homo sapiens
gagatggagtctcactgtgtc

SEQ ID NO: 20423 - RNA, 21 nt, RNAi-sense strand
gauggagucucacugugucuu

SEQ ID NO: 20424 - RNA, 21 nt, RNAi-antisense strand
gacacagugagacuccaucuu

SEQ ID NO: 20425 - DNA, 21 bp, Homo sapiens
gatggagtctcactgtgtcac

SEQ ID NO: 20426 - RNA, 21 nt, RNAi-sense strand
uggagucucacugugucacuu

SEQ ID NO: 20427 - RNA, 21 nt, RNAi-antisense strand
gugacacagugagacuccauu

SEQ ID NO: 20428 - DNA, 21 bp, Homo sapiens
gagtgcagtggcgcaatctca

SEQ ID NO: 20429 - RNA, 21 nt, RNAi-sense strand
gugcaguggcgcaaucucauu

SEQ ID NO: 20430 - RNA, 21 nt, RNAi-antisense strand
ugagauugcgccacugcacuu

SEQ ID NO: 20431 - DNA, 21 bp, Homo sapiens
gattgcaggtgcacaccacca

SEQ ID NO: 20432 - RNA, 21 nt, RNAi-sense strand
uugcaggugcacaccaccauu

SEQ ID NO: 20433 - RNA, 21 nt, RNAi-antisense strand
ugguggugugcaccugcaauu

SEQ ID NO: 20434 - DNA, 21 bp, Homo sapiens
gacaggctggtctggaactgc

SEQ ID NO: 20435 - RNA, 21 nt, RNAi-sense strand
caggcuggucuggaacugcuu

SEQ ID NO: 20436 - RNA, 21 nt, RNAi-antisense strand
gcaguuccagaccagccuguu

SEQ ID NO: 20437 - DNA, 21 bp, Homo sapiens
gaactgctgacctcaactaat

SEQ ID NO: 20438 - RNA, 21 nt, RNAi-sense strand
acugcugaccucaacuaauuu

SEQ ID NO: 20439 - RNA, 21 nt, RNAi-antisense strand
auuaguugaggucagcaguuu

SEQ ID NO: 20440 - DNA, 21 bp, Homo sapiens
gattacaggcatgagccacct

SEQ ID NO: 20441 - RNA, 21 nt, RNAi-sense strand
uuacaggcaugagccaccuuu

SEQ ID NO: 20442 - RNA, 21 nt, RNAi-antisense strand
agguggcucaugccuguaauu

SEQ ID NO: 20443 - DNA, 21 bp, Homo sapiens
gagacagagtctctctctgtc

SEQ ID NO: 20444 - RNA, 21 nt, RNAi-sense strand
gacagagucucucucugucuu

SEQ ID NO: 20445 - RNA, 21 nt, RNAi-antisense strand
gacagagagagacucugucuu

SEQ ID NO: 20446 - DNA, 21 bp, Homo sapiens
gacagagtctctctctgtcac

SEQ ID NO: 20447 - RNA, 21 nt, RNAi-sense strand
cagagucucucucugucacuu

SEQ ID NO: 20448 - RNA, 21 nt, RNAi-antisense strand
gugacagagagagacucuguu

SEQ ID NO: 20449 - DNA, 21 bp, Homo sapiens
gagtctctctctgtcacctag

SEQ ID NO: 20450 - RNA, 21 nt, RNAi-sense strand
gucucucucugucaccuaguu

SEQ ID NO: 20451 - RNA, 21 nt, RNAi-antisense strand
cuaggugacagagagagacuu

SEQ ID NO: 20452 - DNA, 21 bp, Homo sapiens
gagtgcagtggcacgatctcg

SEQ ID NO: 20453 - RNA, 21 nt, RNAi-sense strand
gugcaguggcacgaucucguu

SEQ ID NO: 20454 - RNA, 21 nt, RNAi-antisense strand
cgagaucgugccacugcacuu

SEQ ID NO: 20455 - DNA, 21 bp, Homo sapiens
gatctcggctcactgcaacct

SEQ ID NO: 20456 - RNA, 21 nt, RNAi-sense strand
ucucggcucacugcaaccuuu

SEQ ID NO: 20457 - RNA, 21 nt, RNAi-antisense strand
agguugcagugagccgagauu

SEQ ID NO: 20458 - DNA, 21 bp, Homo sapiens
gatttcaccatgttggctagg

SEQ ID NO: 20459 - RNA, 21 nt, RNAi-sense strand
uuucaccauguuggcuagguu

SEQ ID NO: 20460 - RNA, 21 nt, RNAi-antisense strand
ccuagccaacauggugaaauu

SEQ ID NO: 20461 - DNA, 21 bp, Homo sapiens
gaactcctggcctcaagtgat

SEQ ID NO: 20462 - RNA, 21 nt, RNAi-sense strand
acuccuggccucaagugauuu

SEQ ID NO: 20463 - RNA, 21 nt, RNAi-antisense strand
aucacuugaggccaggaguuu

SEQ ID NO: 20464 - DNA, 21 bp, Homo sapiens
gattacaggcgtgagccactg

SEQ ID NO: 20465 - RNA, 21 nt, RNAi-sense strand
uuacaggcgugagccacuguu

SEQ ID NO: 20466 - RNA, 21 nt, RNAi-antisense strand
caguggcucacgccuguaauu

SEQ ID NO: 20467 - DNA, 21 bp, Homo sapiens
gacctctttgagcatctgaaa

SEQ ID NO: 20468 - RNA, 21 nt, RNAi-sense strand
ccucuuugagcaucugaaauu

SEQ ID NO: 20469 - RNA, 21 nt, RNAi-antisense strand
uuucagaugcucaaagagguu

SEQ ID NO: 20470 - DNA, 21 bp, Homo sapiens
gacttccttgttaccaggaag

SEQ ID NO: 20471 - RNA, 21 nt, RNAi-sense strand
cuuccuuguuaccaggaaguu

SEQ ID NO: 20472 - RNA, 21 nt, RNAi-antisense strand
cuuccugguaacaaggaaguu

SEQ ID NO: 20473 - DNA, 21 bp, Homo sapiens
gaacatacattgatcttgagt

SEQ ID NO: 20474 - RNA, 21 nt, RNAi-sense strand
acauacauugaucuugaguuu

SEQ ID NO: 20475 - RNA, 21 nt, RNAi-antisense strand
acucaagaucaauguauguuu

SEQ ID NO: 20476 - DNA, 21 bp, Homo sapiens
gatcttgagttaatgcgtggt

SEQ ID NO: 20477 - RNA, 21 nt, RNAi-sense strand
ucuugaguuaaugcgugguuu

SEQ ID NO: 20478 - RNA, 21 nt, RNAi-antisense strand
accacgcauuaacucaagauu

SEQ ID NO: 20479 - DNA, 21 bp, Homo sapiens
gaagtctggaatacagagtgt

SEQ ID NO: 20480 - RNA, 21 nt, RNAi-sense strand
agucuggaauacagaguguuu

SEQ ID NO: 20481 - RNA, 21 nt, RNAi-antisense strand
acacucuguauuccagacuuu

SEQ ID NO: 20482 - DNA, 21 bp, Homo sapiens
gaatacagagtgtaacactgt

SEQ ID NO: 20483 - RNA, 21 nt, RNAi-sense strand
auacagaguguaacacuguuu

SEQ ID NO: 20484 - RNA, 21 nt, RNAi-antisense strand
acaguguuacacucuguauuu

SEQ ID NO: 20485 - DNA, 21 bp, Homo sapiens
gagtgtaacactgtgtactgc

SEQ ID NO: 20486 - RNA, 21 nt, RNAi-sense strand
guguaacacuguguacugcuu

SEQ ID NO: 20487 - RNA, 21 nt, RNAi-antisense strand
gcaguacacaguguuacacuu

SEQ ID NO: 20488 - DNA, 21 bp, Homo sapiens
gacaggtattataaattgtgg

SEQ ID NO: 20489 - RNA, 21 nt, RNAi-sense strand
cagguauuauaaauugugguu

SEQ ID NO: 20490 - RNA, 21 nt, RNAi-antisense strand
ccacaauuuauaauaccuguu

SEQ ID NO: 20491 - DNA, 21 bp, Homo sapiens
gatccagttacttgcttattt

SEQ ID NO: 20492 - RNA, 21 nt, RNAi-sense strand
uccaguuacuugcuuauuuuu

SEQ ID NO: 20493 - RNA, 21 nt, RNAi-antisense strand
aaauaagcaaguaacuggauu

SEQ ID NO: 20494 - DNA, 21 bp, Homo sapiens
gagatatcaagtatggcaggt

SEQ ID NO: 20495 - RNA, 21 nt, RNAi-sense strand
gauaucaaguauggcagguuu

SEQ ID NO: 20496 - RNA, 21 nt, RNAi-antisense strand
accugccauacuugauaucuu

SEQ ID NO: 20497 - DNA, 21 bp, Homo sapiens
gatatcaagtatggcaggtat

SEQ ID NO: 20498 - RNA, 21 nt, RNAi-sense strand
uaucaaguauggcagguauuu

SEQ ID NO: 20499 - RNA, 21 nt, RNAi-antisense strand
auaccugccauacuugauauu

SEQ ID NO: 20500 - DNA, 21 bp, Homo sapiens
tatgtccgctggattgtgagg

SEQ ID NO: 20501 - RNA, 21 nt, RNAi-sense strand
uguccgcuggauugugagguu

SEQ ID NO: 20502 - RNA, 21 nt, RNAi-antisense strand
ccucacaauccagcggacauu

SEQ ID NO: 20503 - DNA, 21 bp, Homo sapiens
tacatgcgaacggctggtacg

SEQ ID NO: 20504 - RNA, 21 nt, RNAi-sense strand
caugcgaacggcugguacguu

SEQ ID NO: 20505 - RNA, 21 nt, RNAi-antisense strand
cguaccagccguucgcauguu

SEQ ID NO: 20506 - DNA, 21 bp, Homo sapiens
taccagcactacatcctggcc

SEQ ID NO: 20507 - RNA, 21 nt, RNAi-sense strand
ccagcacuacauccuggccuu

SEQ ID NO: 20508 - RNA, 21 nt, RNAi-antisense strand
ggccaggauguagugcugguu

SEQ ID NO: 20509 - DNA, 21 bp, Homo sapiens
tacatcctggccaaggtggaa

SEQ ID NO: 20510 - RNA, 21 nt, RNAi-sense strand
cauccuggccaagguggaauu

SEQ ID NO: 20511 - RNA, 21 nt, RNAi-antisense strand
uuccaccuuggccaggauguu

SEQ ID NO: 20512 - DNA, 21 bp, Homo sapiens
tattgccaggcatcttaacca

SEQ ID NO: 20513 - RNA, 21 nt, RNAi-sense strand
uugccaggcaucuuaaccauu

SEQ ID NO: 20514 - RNA, 21 nt, RNAi-antisense strand
ugguuaagaugccuggcaauu

SEQ ID NO: 20515 - DNA, 21 bp, Homo sapiens
taaccaagaagttgcagttcg

SEQ ID NO: 20516 - RNA, 21 nt, RNAi-sense strand
accaagaaguugcaguucguu

SEQ ID NO: 20517 - RNA, 21 nt, RNAi-antisense strand
cgaacugcaacuucuugguuu

SEQ ID NO: 20518 - DNA, 21 bp, Homo sapiens
tatctaaagaatatgaggagg

SEQ ID NO: 20519 - RNA, 21 nt, RNAi-sense strand
ucuaaagaauaugaggagguu

SEQ ID NO: 20520 - RNA, 21 nt, RNAi-antisense strand
ccuccucauauucuuuagauu

SEQ ID NO: 20521 - DNA, 21 bp, Homo sapiens
taaagaatatgaggaggctaa

SEQ ID NO: 20522 - RNA, 21 nt, RNAi-sense strand
aagaauaugaggaggcuaauu

SEQ ID NO: 20523 - RNA, 21 nt, RNAi-antisense strand
uuagccuccucauauucuuuu

SEQ ID NO: 20524 - DNA, 21 bp, Homo sapiens
tatgaggaggctaatttcaga

SEQ ID NO: 20525 - RNA, 21 nt, RNAi-sense strand
ugaggaggcuaauuucagauu

SEQ ID NO: 20526 - RNA, 21 nt, RNAi-antisense strand
ucugaaauuagccuccucauu

SEQ ID NO: 20527 - DNA, 21 bp, Homo sapiens
taatttcagagctatatgtgc

SEQ ID NO: 20528 - RNA, 21 nt, RNAi-sense strand
auuucagagcuauaugugcuu

SEQ ID NO: 20529 - RNA, 21 nt, RNAi-antisense strand
gcacauauagcucugaaauuu

SEQ ID NO: 20530 - DNA, 21 bp, Homo sapiens
tatatgtgcgagataactgcc

SEQ ID NO: 20531 - RNA, 21 nt, RNAi-sense strand
uaugugcgagauaacugccuu

SEQ ID NO: 20532 - RNA, 21 nt, RNAi-antisense strand
ggcaguuaucucgcacauauu

SEQ ID NO: 20533 - DNA, 21 bp, Homo sapiens
tatgtgcgagataactgccac

SEQ ID NO: 20534 - RNA, 21 nt, RNAi-sense strand
ugugcgagauaacugccacuu

SEQ ID NO: 20535 - RNA, 21 nt, RNAi-antisense strand
guggcaguuaucucgcacauu

SEQ ID NO: 20536 - DNA, 21 bp, Homo sapiens
tagctactggtggaattctgt

SEQ ID NO: 20537 - RNA, 21 nt, RNAi-sense strand
gcuacugguggaauucuguuu

SEQ ID NO: 20538 - RNA, 21 nt, RNAi-antisense strand
acagaauuccaccaguagcuu

SEQ ID NO: 20539 - DNA, 21 bp, Homo sapiens
tactggtggaattctgtggtt

SEQ ID NO: 20540 - RNA, 21 nt, RNAi-sense strand
cugguggaauucugugguuuu

SEQ ID NO: 20541 - RNA, 21 nt, RNAi-antisense strand
aaccacagaauuccaccaguu

SEQ ID NO: 20542 - DNA, 21 bp, Homo sapiens
tatctctgttggcgtcatcaa

SEQ ID NO: 20543 - RNA, 21 nt, RNAi-sense strand
ucucuguuggcgucaucaauu

SEQ ID NO: 20544 - RNA, 21 nt, RNAi-antisense strand
uugaugacgccaacagagauu

SEQ ID NO: 20545 - DNA, 21 bp, Homo sapiens
taatagtggagatttgtgctc

SEQ ID NO: 20546 - RNA, 21 nt, RNAi-sense strand
auaguggagauuugugcucuu

SEQ ID NO: 20547 - RNA, 21 nt, RNAi-antisense strand
gagcacaaaucuccacuauuu

SEQ ID NO: 20548 - DNA, 21 bp, Homo sapiens
tagtggagatttgtgctctac

SEQ ID NO: 20549 - RNA, 21 nt, RNAi-sense strand
guggagauuugugcucuacuu

SEQ ID NO: 20550 - RNA, 21 nt, RNAi-antisense strand
guagagcacaaaucuccacuu

SEQ ID NO: 20551 - DNA, 21 bp, Homo sapiens
tatattacgtactttgtccgt

SEQ ID NO: 20552 - RNA, 21 nt, RNAi-sense strand
uauuacguacuuuguccguuu

SEQ ID NO: 20553 - RNA, 21 nt, RNAi-antisense strand
acggacaaaguacguaauauu

SEQ ID NO: 20554 - DNA, 21 bp, Homo sapiens
tattacgtactttgtccgtgc

SEQ ID NO: 20555 - RNA, 21 nt, RNAi-sense strand
uuacguacuuuguccgugcuu

SEQ ID NO: 20556 - RNA, 21 nt, RNAi-antisense strand
gcacggacaaaguacguaauu

SEQ ID NO: 20557 - DNA, 21 bp, Homo sapiens
tacgtactttgtccgtgcaat

SEQ ID NO: 20558 - RNA, 21 nt, RNAi-sense strand
cguacuuuguccgugcaauuu

SEQ ID NO: 20559 - RNA, 21 nt, RNAi-antisense strand
auugcacggacaaaguacguu

SEQ ID NO: 20560 - DNA, 21 bp, Homo sapiens
tactttgtccgtgcaatgtcg

SEQ ID NO: 20561 - RNA, 21 nt, RNAi-sense strand
cuuuguccgugcaaugucguu

SEQ ID NO: 20562 - RNA, 21 nt, RNAi-antisense strand
cgacauugcacggacaaaguu

SEQ ID NO: 20563 - DNA, 21 bp, Homo sapiens
taccaattgctgcaacggtac

SEQ ID NO: 20564 - RNA, 21 nt, RNAi-sense strand
ccaauugcugcaacgguacuu

SEQ ID NO: 20565 - RNA, 21 nt, RNAi-antisense strand
guaccguugcagcaauugguu

SEQ ID NO: 20566 - DNA, 21 bp, Homo sapiens
tactggttatgctccagcttc

SEQ ID NO: 20567 - RNA, 21 nt, RNAi-sense strand
cugguuaugcuccagcuucuu

SEQ ID NO: 20568 - RNA, 21 nt, RNAi-antisense strand
gaagcuggagcauaaccaguu

SEQ ID NO: 20569 - DNA, 21 bp, Homo sapiens
taccatcgaccaagtcagatt

SEQ ID NO: 20570 - RNA, 21 nt, RNAi-sense strand
ccaucgaccaagucagauuuu

SEQ ID NO: 20571 - RNA, 21 nt, RNAi-antisense strand
aaucugacuuggucgaugguu

SEQ ID NO: 20572 - DNA, 21 bp, Homo sapiens
tataaagacatatttgctgcc

SEQ ID NO: 20573 - RNA, 21 nt, RNAi-sense strand
uaaagacauauuugcugccuu

SEQ ID NO: 20574 - RNA, 21 nt, RNAi-antisense strand
ggcagcaaauaugucuuuauu

SEQ ID NO: 20575 - DNA, 21 bp, Homo sapiens
taaagacatatttgctgcctt

SEQ ID NO: 20576 - RNA, 21 nt, RNAi-sense strand
aagacauauuugcugccuuuu

SEQ ID NO: 20577 - RNA, 21 nt, RNAi-antisense strand
aaggcagcaaauaugucuuuu

SEQ ID NO: 20578 - DNA, 21 bp, Homo sapiens
tatttgctgcctttaatacca

SEQ ID NO: 20579 - RNA, 21 nt, RNAi-sense strand
uuugcugccuuuaauaccauu

SEQ ID NO: 20580 - RNA, 21 nt, RNAi-antisense strand
ugguauuaaaggcagcaaauu

SEQ ID NO: 20581 - DNA, 21 bp, Homo sapiens
taggttaagatgtaatccaga

SEQ ID NO: 20582 - RNA, 21 nt, RNAi-sense strand
gguuaagauguaauccagauu

SEQ ID NO: 20583 - RNA, 21 nt, RNAi-antisense strand
ucuggauuacaucuuaaccuu

SEQ ID NO: 20584 - DNA, 21 bp, Homo sapiens
taagatgtaatccagaccagg

SEQ ID NO: 20585 - RNA, 21 nt, RNAi-sense strand
agauguaauccagaccagguu

SEQ ID NO: 20586 - RNA, 21 nt, RNAi-antisense strand
ccuggucuggauuacaucuuu

SEQ ID NO: 20587 - DNA, 21 bp, Homo sapiens
taatccagaccaggcacagtg

SEQ ID NO: 20588 - RNA, 21 nt, RNAi-sense strand
auccagaccaggcacaguguu

SEQ ID NO: 20589 - RNA, 21 nt, RNAi-antisense strand
cacugugccuggucuggauuu

SEQ ID NO: 20590 - DNA, 21 bp, Homo sapiens
tagtggcaggtgcctgtaatc

SEQ ID NO: 20591 - RNA, 21 nt, RNAi-sense strand
guggcaggugccuguaaucuu

SEQ ID NO: 20592 - RNA, 21 nt, RNAi-antisense strand
gauuacaggcaccugccacuu

SEQ ID NO: 20593 - DNA, 21 bp, Homo sapiens
tacagaggtttcagtgagctg

SEQ ID NO: 20594 - RNA, 21 nt, RNAi-sense strand
cagagguuucagugagcuguu

SEQ ID NO: 20595 - RNA, 21 nt, RNAi-antisense strand
cagcucacugaaaccucuguu

SEQ ID NO: 20596 - DNA, 21 bp, Homo sapiens
tagaatagaaccaaagtgcct

SEQ ID NO: 20597 - RNA, 21 nt, RNAi-sense strand
gaauagaaccaaagugccuuu

SEQ ID NO: 20598 - RNA, 21 nt, RNAi-antisense strand
aggcacuuugguucuauucuu

SEQ ID NO: 20599 - DNA, 21 bp, Homo sapiens
tagaaccaaagtgcctgtctc

SEQ ID NO: 20600 - RNA, 21 nt, RNAi-sense strand
gaaccaaagugccugucucuu

SEQ ID NO: 20601 - RNA, 21 nt, RNAi-antisense strand
gagacaggcacuuugguucuu

SEQ ID NO: 20602 - DNA, 21 bp, Homo sapiens
tacagtttgttagagctacca

SEQ ID NO: 20603 - RNA, 21 nt, RNAi-sense strand
caguuuguuagagcuaccauu

SEQ ID NO: 20604 - RNA, 21 nt, RNAi-antisense strand
ugguagcucuaacaaacuguu

SEQ ID NO: 20605 - DNA, 21 bp, Homo sapiens
tagagctaccagaactttgga

SEQ ID NO: 20606 - RNA, 21 nt, RNAi-sense strand
gagcuaccagaacuuuggauu

SEQ ID NO: 20607 - RNA, 21 nt, RNAi-antisense strand
uccaaaguucugguagcucuu

SEQ ID NO: 20608 - DNA, 21 bp, Homo sapiens
taccagaactttggagaatag

SEQ ID NO: 20609 - RNA, 21 nt, RNAi-sense strand
ccagaacuuuggagaauaguu

SEQ ID NO: 20610 - RNA, 21 nt, RNAi-antisense strand
cuauucuccaaaguucugguu

SEQ ID NO: 20611 - DNA, 21 bp, Homo sapiens
tagctactgaatgatggcaag

SEQ ID NO: 20612 - RNA, 21 nt, RNAi-sense strand
gcuacugaaugauggcaaguu

SEQ ID NO: 20613 - RNA, 21 nt, RNAi-antisense strand
cuugccaucauucaguagcuu

SEQ ID NO: 20614 - DNA, 21 bp, Homo sapiens
tactgaatgatggcaagttaa

SEQ ID NO: 20615 - RNA, 21 nt, RNAi-sense strand
cugaaugauggcaaguuaauu

SEQ ID NO: 20616 - RNA, 21 nt, RNAi-antisense strand
uuaacuugccaucauucaguu

SEQ ID NO: 20617 - DNA, 21 bp, Homo sapiens
taagaggatcagtgagatgat

SEQ ID NO: 20618 - RNA, 21 nt, RNAi-sense strand
agaggaucagugagaugauuu

SEQ ID NO: 20619 - RNA, 21 nt, RNAi-antisense strand
aucaucucacugauccucuuu

SEQ ID NO: 20620 - DNA, 21 bp, Homo sapiens
tacaggcatgagccacctcac

SEQ ID NO: 20621 - RNA, 21 nt, RNAi-sense strand
caggcaugagccaccucacuu

SEQ ID NO: 20622 - RNA, 21 nt, RNAi-antisense strand
gugagguggcucaugccuguu

SEQ ID NO: 20623 - DNA, 21 bp, Homo sapiens
taatgagacagagtctctctc

SEQ ID NO: 20624 - RNA, 21 nt, RNAi-sense strand
augagacagagucucucucuu

SEQ ID NO: 20625 - RNA, 21 nt, RNAi-antisense strand
gagagagacucugucucauuu

SEQ ID NO: 20626 - DNA, 21 bp, Homo sapiens
taggctggagtgcagtggcac

SEQ ID NO: 20627 - RNA, 21 nt, RNAi-sense strand
ggcuggagugcaguggcacuu

SEQ ID NO: 20628 - RNA, 21 nt, RNAi-antisense strand
gugccacugcacuccagccuu

SEQ ID NO: 20629 - DNA, 21 bp, Homo sapiens
taggctggtcttgaactcctg

SEQ ID NO: 20630 - RNA, 21 nt, RNAi-sense strand
ggcuggucuugaacuccuguu

SEQ ID NO: 20631 - RNA, 21 nt, RNAi-antisense strand
caggaguucaagaccagccuu

SEQ ID NO: 20632 - DNA, 21 bp, Homo sapiens
tacaggcgtgagccactgtgc

SEQ ID NO: 20633 - RNA, 21 nt, RNAi-sense strand
caggcgugagccacugugcuu

SEQ ID NO: 20634 - RNA, 21 nt, RNAi-antisense strand
gcacaguggcucacgccuguu

SEQ ID NO: 20635 - DNA, 21 bp, Homo sapiens
tagacctctttgagcatctga

SEQ ID NO: 20636 - RNA, 21 nt, RNAi-sense strand
gaccucuuugagcaucugauu

SEQ ID NO: 20637 - RNA, 21 nt, RNAi-antisense strand
ucagaugcucaaagaggucuu

SEQ ID NO: 20638 - DNA, 21 bp, Homo sapiens
tatatgcagtaaagtagtcca

SEQ ID NO: 20639 - RNA, 21 nt, RNAi-sense strand
uaugcaguaaaguaguccauu

SEQ ID NO: 20640 - RNA, 21 nt, RNAi-antisense strand
uggacuacuuuacugcauauu

SEQ ID NO: 20641 - DNA, 21 bp, Homo sapiens
tatgcagtaaagtagtccatg

SEQ ID NO: 20642 - RNA, 21 nt, RNAi-sense strand
ugcaguaaaguaguccauguu

SEQ ID NO: 20643 - RNA, 21 nt, RNAi-antisense strand
cauggacuacuuuacugcauu

SEQ ID NO: 20644 - DNA, 21 bp, Homo sapiens
taaagtagtccatgcatacaa

SEQ ID NO: 20645 - RNA, 21 nt, RNAi-sense strand
aaguaguccaugcauacaauu

SEQ ID NO: 20646 - RNA, 21 nt, RNAi-antisense strand
uuguaugcauggacuacuuuu

SEQ ID NO: 20647 - DNA, 21 bp, Homo sapiens
taacatggtagatgatgttgc

SEQ ID NO: 20648 - RNA, 21 nt, RNAi-sense strand
acaugguagaugauguugcuu

SEQ ID NO: 20649 - RNA, 21 nt, RNAi-antisense strand
gcaacaucaucuaccauguuu

SEQ ID NO: 20650 - DNA, 21 bp, Homo sapiens
taagaagtctggaatacagag

SEQ ID NO: 20651 - RNA, 21 nt, RNAi-sense strand
agaagucuggaauacagaguu

SEQ ID NO: 20652 - RNA, 21 nt, RNAi-antisense strand
cucuguauuccagacuucuuu

SEQ ID NO: 20653 - DNA, 21 bp, Homo sapiens
tacagagtgtaacactgtgta

SEQ ID NO: 20654 - RNA, 21 nt, RNAi-sense strand
cagaguguaacacuguguauu

SEQ ID NO: 20655 - RNA, 21 nt, RNAi-antisense strand
uacacaguguuacacucuguu

SEQ ID NO: 20656 - DNA, 21 bp, Homo sapiens
taacactgtgtactgctagca

SEQ ID NO: 20657 - RNA, 21 nt, RNAi-sense strand
acacuguguacugcuagcauu

SEQ ID NO: 20658 - RNA, 21 nt, RNAi-antisense strand
ugcuagcaguacacaguguuu

SEQ ID NO: 20659 - DNA, 21 bp, Homo sapiens
taggcttaaactatgatagag

SEQ ID NO: 20660 - RNA, 21 nt, RNAi-sense strand
ggcuuaaacuaugauagaguu

SEQ ID NO: 20661 - RNA, 21 nt, RNAi-antisense strand
cucuaucauaguuuaagccuu

SEQ ID NO: 20662 - DNA, 21 bp, Homo sapiens
taaattgtggatccagttact

SEQ ID NO: 20663 - RNA, 21 nt, RNAi-sense strand
aauuguggauccaguuacuuu

SEQ ID NO: 20664 - RNA, 21 nt, RNAi-antisense strand
aguaacuggauccacaauuuu

SEQ ID NO: 20665 - DNA, 21 bp, Homo sapiens
tagctctggttgagatatcaa

SEQ ID NO: 20666 - RNA, 21 nt, RNAi-sense strand
gcucugguugagauaucaauu

SEQ ID NO: 20667 - RNA, 21 nt, RNAi-antisense strand
uugauaucucaaccagagcuu

SEQ ID NO: 20668 - DNA, 21 bp, Homo sapiens
tatcaagtatggcaggtattt

SEQ ID NO: 20669 - RNA, 21 nt, RNAi-sense strand
ucaaguauggcagguauuuuu

SEQ ID NO: 20670 - RNA, 21 nt, RNAi-antisense strand
aaauaccugccauacuugauu

SEQ ID NO: 20671 - DNA, 21 bp, Homo sapiens
tatggcaggtatttgagaagg

SEQ ID NO: 20672 - RNA, 21 nt, RNAi-sense strand
uggcagguauuugagaagguu

SEQ ID NO: 20673 - RNA, 21 nt, RNAi-antisense strand
ccuucucaaauaccugccauu

SEQ ID NO: 20674 - DNA, 21 bp, Homo sapiens
aatttcagagctatatgtgcg

SEQ ID NO: 20675 - RNA, 21 nt, RNAi-sense strand
uuucagagcuauaugugcguu

SEQ ID NO: 20676 - RNA, 21 nt, RNAi-antisense strand
cgcacauauagcucugaaauu

SEQ ID NO: 20677 - DNA, 21 bp, Homo sapiens
aacagttagctactggtggaa

SEQ ID NO: 20678 - RNA, 21 nt, RNAi-sense strand
caguuagcuacugguggaauu

SEQ ID NO: 20679 - RNA, 21 nt, RNAi-antisense strand
uuccaccaguagcuaacuguu

SEQ ID NO: 20680 - DNA, 21 bp, Homo sapiens
aatgtcggtgttgatgatacc

SEQ ID NO: 20681 - RNA, 21 nt, RNAi-sense strand
ugucgguguugaugauaccuu

SEQ ID NO: 20682 - RNA, 21 nt, RNAi-antisense strand
gguaucaucaacaccgacauu

SEQ ID NO: 20683 - DNA, 21 bp, Homo sapiens
cagttcgtgcaaatcagttgg

SEQ ID NO: 20684 - RNA, 21 nt, RNAi-sense strand
guucgugcaaaucaguugguu

SEQ ID NO: 20685 - RNA, 21 nt, RNAi-antisense strand
ccaacugauuugcacgaacuu

SEQ ID NO: 20686 - DNA, 21 bp, Homo sapiens
cagagctatatgtgcgagata

SEQ ID NO: 20687 - RNA, 21 nt, RNAi-sense strand
gagcuauaugugcgagauauu

SEQ ID NO: 20688 - RNA, 21 nt, RNAi-antisense strand
uaucucgcacauauagcucuu

SEQ ID NO: 20689 - DNA, 21 bp, Homo sapiens
caggaacagttagctactggt

SEQ ID NO: 20690 - RNA, 21 nt, RNAi-sense strand
ggaacaguuagcuacugguuu

SEQ ID NO: 20691 - RNA, 21 nt, RNAi-antisense strand
accaguagcuaacuguuccuu

SEQ ID NO: 20692 - DNA, 21 bp, Homo sapiens
cacttggattctgcctatctc

SEQ ID NO: 20693 - RNA, 21 nt, RNAi-sense strand
cuuggauucugccuaucucuu

SEQ ID NO: 20694 - RNA, 21 nt, RNAi-antisense strand
gagauaggcagaauccaaguu

SEQ ID NO: 20695 - DNA, 21 bp, Homo sapiens
caatgtcggtgttgatgatac

SEQ ID NO: 20696 - RNA, 21 nt, RNAi-sense strand
augucgguguugaugauacuu

SEQ ID NO: 20697 - RNA, 21 nt, RNAi-antisense strand
guaucaucaacaccgacauuu

SEQ ID NO: 20698 - DNA, 21 bp, Homo sapiens
cagaatttgctgctgcgttct

SEQ ID NO: 20699 - RNA, 21 nt, RNAi-sense strand
gaauuugcugcugcguucuuu

SEQ ID NO: 20700 - RNA, 21 nt, RNAi-antisense strand
agaacgcagcagcaaauucuu

SEQ ID NO: 20701 - DNA, 21 bp, Homo sapiens
caactttgccgaataccatcg

SEQ ID NO: 20702 - RNA, 21 nt, RNAi-sense strand
acuuugccgaauaccaucguu

SEQ ID NO: 20703 - RNA, 21 nt, RNAi-antisense strand
cgaugguauucggcaaaguuu

SEQ ID NO: 20704 - DNA, 21 bp, Homo sapiens
gaatatgaggaggctaatttc

SEQ ID NO: 20705 - RNA, 21 nt, RNAi-sense strand
auaugaggaggcuaauuucuu

SEQ ID NO: 20706 - RNA, 21 nt, RNAi-antisense strand
gaaauuagccuccucauauuu

SEQ ID NO: 20707 - DNA, 21 bp, Homo sapiens
gagctatatgtgcgagataac

SEQ ID NO: 20708 - RNA, 21 nt, RNAi-sense strand
gcuauaugugcgagauaacuu

SEQ ID NO: 20709 - RNA, 21 nt, RNAi-antisense strand
guuaucucgcacauauagcuu

SEQ ID NO: 20710 - DNA, 21 bp, Homo sapiens
gaacagttagctactggtgga

SEQ ID NO: 20711 - RNA, 21 nt, RNAi-sense strand
acaguuagcuacugguggauu

SEQ ID NO: 20712 - RNA, 21 nt, RNAi-antisense strand
uccaccaguagcuaacuguuu

SEQ ID NO: 20713 - DNA, 21 bp, Homo sapiens
gatgataccaattgctgcaac

SEQ ID NO: 20714 - RNA, 21 nt, RNAi-sense strand
ugauaccaauugcugcaacuu

SEQ ID NO: 20715 - RNA, 21 nt, RNAi-antisense strand
guugcagcaauugguaucauu

SEQ ID NO: 20716 - DNA, 21 bp, Homo sapiens
gataccaattgctgcaacggt

SEQ ID NO: 20717 - RNA, 21 nt, RNAi-sense strand
uaccaauugcugcaacgguuu

SEQ ID NO: 20718 - RNA, 21 nt, RNAi-antisense strand
accguugcagcaauugguauu

SEQ ID NO: 20719 - DNA, 21 bp, Homo sapiens
gaatttgctgctgcgttctcc

SEQ ID NO: 20720 - RNA, 21 nt, RNAi-sense strand
auuugcugcugcguucuccuu

SEQ ID NO: 20721 - RNA, 21 nt, RNAi-antisense strand
ggagaacgcagcagcaaauuu

SEQ ID NO: 20722 - DNA, 21 bp, Homo sapiens
gatttcgccaactttgccgaa

SEQ ID NO: 20723 - RNA, 21 nt, RNAi-sense strand
uuucgccaacuuugccgaauu

SEQ ID NO: 20724 - RNA, 21 nt, RNAi-antisense strand
uucggcaaaguuggcgaaauu

SEQ ID NO: 20725 - DNA, 21 bp, Homo sapiens
taaccaagaagttgcagttcg

SEQ ID NO: 20726 - RNA, 21 nt, RNAi-sense strand
accaagaaguugcaguucguu

SEQ ID NO: 20727 - RNA, 21 nt, RNAi-antisense strand
cgaacugcaacuucuugguuu

SEQ ID NO: 20728 - DNA, 21 bp, Homo sapiens
taatttcagagctatatgtgc

SEQ ID NO: 20729 - RNA, 21 nt, RNAi-sense strand
auuucagagcuauaugugcuu

SEQ ID NO: 20730 - RNA, 21 nt, RNAi-antisense strand
gcacauauagcucugaaauuu

SEQ ID NO: 20731 - DNA, 21 bp, Homo sapiens
tatatgtgcgagataactgcc

SEQ ID NO: 20732 - RNA, 21 nt, RNAi-sense strand
uaugugcgagauaacugccuu

SEQ ID NO: 20733 - RNA, 21 nt, RNAi-antisense strand
ggcaguuaucucgcacauauu

SEQ ID NO: 20734 - DNA, 21 bp, Homo sapiens
tatgtgcgagataactgccac

SEQ ID NO: 20735 - RNA, 21 nt, RNAi-sense strand
ugugcgagauaacugccacuu

SEQ ID NO: 20736 - RNA, 21 nt, RNAi-antisense strand
guggcaguuaucucgcacauu

SEQ ID NO: 20737 - DNA, 21 bp, Homo sapiens
tatattacgtactttgtccgt

SEQ ID NO: 20738 - RNA, 21 nt, RNAi-sense strand
uauuacguacuuuguccguuu

SEQ ID NO: 20739 - RNA, 21 nt, RNAi-antisense strand
acggacaaaguacguaauauu

SEQ ID NO: 20740 - DNA, 21 bp, Homo sapiens
tattacgtactttgtccgtgc

SEQ ID NO: 20741 - RNA, 21 nt, RNAi-sense strand
uuacguacuuuguccgugcuu

SEQ ID NO: 20742 - RNA, 21 nt, RNAi-antisense strand
gcacggacaaaguacguaauu

SEQ ID NO: 20743 - DNA, 21 bp, Homo sapiens
tacgtactttgtccgtgcaat

SEQ ID NO: 20744 - RNA, 21 nt, RNAi-sense strand
cguacuuuguccgugcaauuu

SEQ ID NO: 20745 - RNA, 21 nt, RNAi-antisense strand
auugcacggacaaaguacguu

SEQ ID NO: 20746 - DNA, 21 bp, Homo sapiens
tactttgtccgtgcaatgtcg

SEQ ID NO: 20747 - RNA, 21 nt, RNAi-sense strand
cuuuguccgugcaaugucguu

SEQ ID NO: 20748 - RNA, 21 nt, RNAi-antisense strand
cgacauugcacggacaaaguu

SEQ ID NO: 20749 - DNA, 21 bp, Homo sapiens
taccaattgctgcaacggtac

SEQ ID NO: 20750 - RNA, 21 nt, RNAi-sense strand
ccaauugcugcaacgguacuu

SEQ ID NO: 20751 - RNA, 21 nt, RNAi-antisense strand
guaccguugcagcaauugguu

SEQ ID NO: 20752 - DNA, 21 bp, Homo sapiens
aaccggtctcttcctcggaaa

SEQ ID NO: 20753 - RNA, 21 nt, RNAi-sense strand
ccggucucuuccucggaaauu

SEQ ID NO: 20754 - RNA, 21 nt, RNAi-antisense strand
uuuccgaggaagagaccgguu

SEQ ID NO: 20755 - DNA, 21 bp, Homo sapiens
aaccaccgcctgctcttcagt

SEQ ID NO: 20756 - RNA, 21 nt, RNAi-sense strand
ccaccgccugcucuucaguuu

SEQ ID NO: 20757 - RNA, 21 nt, RNAi-antisense strand
acugaagagcaggcggugguu

SEQ ID NO: 20758 - DNA, 21 bp, Homo sapiens
aagaatctcaagccggagacg

SEQ ID NO: 20759 - RNA, 21 nt, RNAi-sense strand
gaaucucaagccggagacguu

SEQ ID NO: 20760 - RNA, 21 nt, RNAi-antisense strand
cgucuccggcuugagauucuu

SEQ ID NO: 20761 - DNA, 21 bp, Homo sapiens
aatctcaagccggagacgctg

SEQ ID NO: 20762 - RNA, 21 nt, RNAi-sense strand
ucucaagccggagacgcuguu

SEQ ID NO: 20763 - RNA, 21 nt, RNAi-antisense strand
cagcgucuccggcuugagauu

SEQ ID NO: 20764 - DNA, 21 bp, Homo sapiens
aagccggagacgctgatcgac

SEQ ID NO: 20765 - RNA, 21 nt, RNAi-sense strand
gccggagacgcugaucgacuu

SEQ ID NO: 20766 - RNA, 21 nt, RNAi-antisense strand
gucgaucagcgucuccggcuu

SEQ ID NO: 20767 - DNA, 21 bp, Homo sapiens
aaagctgagagcttgattcca

SEQ ID NO: 20768 - RNA, 21 nt, RNAi-sense strand
agcugagagcuugauuccauu

SEQ ID NO: 20769 - RNA, 21 nt, RNAi-antisense strand
uggaaucaagcucucagcuuu

SEQ ID NO: 20770 - DNA, 21 bp, Homo sapiens
aagctgagagcttgattccag

SEQ ID NO: 20771 - RNA, 21 nt, RNAi-sense strand
gcugagagcuugauuccaguu

SEQ ID NO: 20772 - RNA, 21 nt, RNAi-antisense strand
cuggaaucaagcucucagcuu

SEQ ID NO: 20773 - DNA, 21 bp, Homo sapiens
aagcgcaagcgcctcttcctg

SEQ ID NO: 20774 - RNA, 21 nt, RNAi-sense strand
gcgcaagcgccucuuccuguu

SEQ ID NO: 20775 - RNA, 21 nt, RNAi-antisense strand
caggaagaggcgcuugcgcuu

SEQ ID NO: 20776 - DNA, 21 bp, Homo sapiens
aagcgcctcttcctggacagc

SEQ ID NO: 20777 - RNA, 21 nt, RNAi-sense strand
gcgccucuuccuggacagcuu

SEQ ID NO: 20778 - RNA, 21 nt, RNAi-antisense strand
gcuguccaggaagaggcgcuu

SEQ ID NO: 20779 - DNA, 21 bp, Homo sapiens
aacggcctcttcctcttctcc

SEQ ID NO: 20780 - RNA, 21 nt, RNAi-sense strand
cggccucuuccucuucuccuu

SEQ ID NO: 20781 - RNA, 21 nt, RNAi-antisense strand
ggagaagaggaagaggccguu

SEQ ID NO: 20782 - DNA, 21 bp, Homo sapiens
aaccagagaccgagagcatga

SEQ ID NO: 20783 - RNA, 21 nt, RNAi-sense strand
ccagagaccgagagcaugauu

SEQ ID NO: 20784 - RNA, 21 nt, RNAi-antisense strand
ucaugcucucggucucugguu

SEQ ID NO: 20785 - DNA, 21 bp, Homo sapiens
aagaactgcggcacgtgcttc

SEQ ID NO: 20786 - RNA, 21 nt, RNAi-sense strand
gaacugcggcacgugcuucuu

SEQ ID NO: 20787 - RNA, 21 nt, RNAi-antisense strand
gaagcacgugccgcaguucuu

SEQ ID NO: 20788 - DNA, 21 bp, Homo sapiens
aaagccagagctcctctcatc

SEQ ID NO: 20789 - RNA, 21 nt, RNAi-sense strand
agccagagcuccucucaucuu

SEQ ID NO: 20790 - RNA, 21 nt, RNAi-antisense strand
gaugagaggagcucuggcuuu

SEQ ID NO: 20791 - DNA, 21 bp, Homo sapiens
aagccagagctcctctcatca

SEQ ID NO: 20792 - RNA, 21 nt, RNAi-sense strand
gccagagcuccucucaucauu

SEQ ID NO: 20793 - RNA, 21 nt, RNAi-antisense strand
ugaugagaggagcucuggcuu

SEQ ID NO: 20794 - DNA, 21 bp, Homo sapiens
aaagcctttacaaggtactgg

SEQ ID NO: 20795 - RNA, 21 nt, RNAi-sense strand
agccuuuacaagguacugguu

SEQ ID NO: 20796 - RNA, 21 nt, RNAi-antisense strand
ccaguaccuuguaaaggcuuu

SEQ ID NO: 20797 - DNA, 21 bp, Homo sapiens
catggctctgtgagcgctgat

SEQ ID NO: 20798 - RNA, 21 nt, RNAi-sense strand
uggcucugugagcgcugauuu

SEQ ID NO: 20799 - RNA, 21 nt, RNAi-antisense strand
aucagcgcucacagagccauu

SEQ ID NO: 20800 - DNA, 21 bp, Homo sapiens
cacctcgacctctggttctac

SEQ ID NO: 20801 - RNA, 21 nt, RNAi-sense strand
ccucgaccucugguucuacuu

SEQ ID NO: 20802 - RNA, 21 nt, RNAi-antisense strand
guagaaccagaggucgagguu

SEQ ID NO: 20803 - DNA, 21 bp, Homo sapiens
cacatggcctacaacgtcatc

SEQ ID NO: 20804 - RNA, 21 nt, RNAi-sense strand
cauggccuacaacgucaucuu

SEQ ID NO: 20805 - RNA, 21 nt, RNAi-antisense strand
gaugacguuguaggccauguu

SEQ ID NO: 20806 - DNA, 21 bp, Homo sapiens
catggcctacaacgtcatcac

SEQ ID NO: 20807 - RNA, 21 nt, RNAi-sense strand
uggccuacaacgucaucacuu

SEQ ID NO: 20808 - RNA, 21 nt, RNAi-antisense strand
gugaugacguuguaggccauu

SEQ ID NO: 20809 - DNA, 21 bp, Homo sapiens
cacgctccatcacgtacgtga

SEQ ID NO: 20810 - RNA, 21 nt, RNAi-sense strand
cgcuccaucacguacgugauu

SEQ ID NO: 20811 - RNA, 21 nt, RNAi-antisense strand
ucacguacgugauggagcguu

SEQ ID NO: 20812 - DNA, 21 bp, Homo sapiens
catcacgtacgtgagcatcat

SEQ ID NO: 20813 - RNA, 21 nt, RNAi-sense strand
ucacguacgugagcaucauuu

SEQ ID NO: 20814 - RNA, 21 nt, RNAi-antisense strand
augaugcucacguacgugauu

SEQ ID NO: 20815 - DNA, 21 bp, Homo sapiens
cacgtacgtgagcatcatcat

SEQ ID NO: 20816 - RNA, 21 nt, RNAi-sense strand
cguacgugagcaucaucauuu

SEQ ID NO: 20817 - RNA, 21 nt, RNAi-antisense strand
augaugaugcucacguacguu

SEQ ID NO: 20818 - DNA, 21 bp, Homo sapiens
caaccaccgcctgctcttcag

SEQ ID NO: 20819 - RNA, 21 nt, RNAi-sense strand
accaccgccugcucuucaguu

SEQ ID NO: 20820 - RNA, 21 nt, RNAi-antisense strand
cugaagagcaggcggugguuu

SEQ ID NO: 20821 - DNA, 21 bp, Homo sapiens
cagtggctaccagcaccacct

SEQ ID NO: 20822 - RNA, 21 nt, RNAi-sense strand
guggcuaccagcaccaccuuu

SEQ ID NO: 20823 - RNA, 21 nt, RNAi-antisense strand
agguggugcugguagccacuu

SEQ ID NO: 20824 - DNA, 21 bp, Homo sapiens
cagcaccacctgtctgtccgt

SEQ ID NO: 20825 - RNA, 21 nt, RNAi-sense strand
gcaccaccugucuguccguuu

SEQ ID NO: 20826 - RNA, 21 nt, RNAi-antisense strand
acggacagacagguggugcuu

SEQ ID NO: 20827 - DNA, 21 bp, Homo sapiens
caccacctgtctgtccgtgag

SEQ ID NO: 20828 - RNA, 21 nt, RNAi-sense strand
ccaccugucuguccgugaguu

SEQ ID NO: 20829 - RNA, 21 nt, RNAi-antisense strand
cucacggacagacaggugguu

SEQ ID NO: 20830 - DNA, 21 bp, Homo sapiens
cacctgtctgtccgtgagaac

SEQ ID NO: 20831 - RNA, 21 nt, RNAi-sense strand
ccugucuguccgugagaacuu

SEQ ID NO: 20832 - RNA, 21 nt, RNAi-antisense strand
guucucacggacagacagguu

SEQ ID NO: 20833 - DNA, 21 bp, Homo sapiens
catcatcaagaatctcaagcc

SEQ ID NO: 20834 - RNA, 21 nt, RNAi-sense strand
ucaucaagaaucucaagccuu

SEQ ID NO: 20835 - RNA, 21 nt, RNAi-antisense strand
ggcuugagauucuugaugauu

SEQ ID NO: 20836 - DNA, 21 bp, Homo sapiens
catcaagaatctcaagccgga

SEQ ID NO: 20837 - RNA, 21 nt, RNAi-sense strand
ucaagaaucucaagccggauu

SEQ ID NO: 20838 - RNA, 21 nt, RNAi-antisense strand
uccggcuugagauucuugauu

SEQ ID NO: 20839 - DNA, 21 bp, Homo sapiens
caagaatctcaagccggagac

SEQ ID NO: 20840 - RNA, 21 nt, RNAi-sense strand
agaaucucaagccggagacuu

SEQ ID NO: 20841 - RNA, 21 nt, RNAi-antisense strand
gucuccggcuugagauucuuu

SEQ ID NO: 20842 - DNA, 21 bp, Homo sapiens
caagccggagacgctgatcga

SEQ ID NO: 20843 - RNA, 21 nt, RNAi-sense strand
agccggagacgcugaucgauu

SEQ ID NO: 20844 - RNA, 21 nt, RNAi-antisense strand
ucgaucagcgucuccggcuuu

SEQ ID NO: 20845 - DNA, 21 bp, Homo sapiens
catcctcttcatgtacttcag

SEQ ID NO: 20846 - RNA, 21 nt, RNAi-sense strand
uccucuucauguacuucaguu

SEQ ID NO: 20847 - RNA, 21 nt, RNAi-antisense strand
cugaaguacaugaagaggauu

SEQ ID NO: 20848 - DNA, 21 bp, Homo sapiens
catgtacttcagcggctgctt

SEQ ID NO: 20849 - RNA, 21 nt, RNAi-sense strand
uguacuucagcggcugcuuuu

SEQ ID NO: 20850 - RNA, 21 nt, RNAi-antisense strand
aagcagccgcugaaguacauu

SEQ ID NO: 20851 - DNA, 21 bp, Homo sapiens
cagcggctgctttactgcctc

SEQ ID NO: 20852 - RNA, 21 nt, RNAi-sense strand
gcggcugcuuuacugccucuu

SEQ ID NO: 20853 - RNA, 21 nt, RNAi-antisense strand
gaggcaguaaagcagccgcuu

SEQ ID NO: 20854 - DNA, 21 bp, Homo sapiens
cagtggcctgtactactggta

SEQ ID NO: 20855 - RNA, 21 nt, RNAi-sense strand
guggccuguacuacugguauu

SEQ ID NO: 20856 - RNA, 21 nt, RNAi-antisense strand
uaccaguaguacaggccacuu

SEQ ID NO: 20857 - DNA, 21 bp, Homo sapiens
cagatcttcatcctcttcatc

SEQ ID NO: 20858 - RNA, 21 nt, RNAi-sense strand
gaucuucauccucuucaucuu

SEQ ID NO: 20859 - RNA, 21 nt, RNAi-antisense strand
gaugaagaggaugaagaucuu

SEQ ID NO: 20860 - DNA, 21 bp, Homo sapiens
catcctcttcatcttcacctt

SEQ ID NO: 20861 - RNA, 21 nt, RNAi-sense strand
uccucuucaucuucaccuuuu

SEQ ID NO: 20862 - RNA, 21 nt, RNAi-antisense strand
aaggugaagaugaagaggauu

SEQ ID NO: 20863 - DNA, 21 bp, Homo sapiens
catcttcaccttcttcgccat

SEQ ID NO: 20864 - RNA, 21 nt, RNAi-sense strand
ucuucaccuucuucgccauuu

SEQ ID NO: 20865 - RNA, 21 nt, RNAi-antisense strand
auggcgaagaaggugaagauu

SEQ ID NO: 20866 - DNA, 21 bp, Homo sapiens
caccttcttcgccatgctggc

SEQ ID NO: 20867 - RNA, 21 nt, RNAi-sense strand
ccuucuucgccaugcuggcuu

SEQ ID NO: 20868 - RNA, 21 nt, RNAi-antisense strand
gccagcauggcgaagaagguu

SEQ ID NO: 20869 - DNA, 21 bp, Homo sapiens
cagaagcgcaagcgcctcttc

SEQ ID NO: 20870 - RNA, 21 nt, RNAi-sense strand
gaagcgcaagcgccucuucuu

SEQ ID NO: 20871 - RNA, 21 nt, RNAi-antisense strand
gaagaggcgcuugcgcuucuu

SEQ ID NO: 20872 - DNA, 21 bp, Homo sapiens
caagcgcctcttcctggacag

SEQ ID NO: 20873 - RNA, 21 nt, RNAi-sense strand
agcgccucuuccuggacaguu

SEQ ID NO: 20874 - RNA, 21 nt, RNAi-antisense strand
cuguccaggaagaggcgcuuu

SEQ ID NO: 20875 - DNA, 21 bp, Homo sapiens
cagcaacggcctcttcctctt

SEQ ID NO: 20876 - RNA, 21 nt, RNAi-sense strand
gcaacggccucuuccucuuuu

SEQ ID NO: 20877 - RNA, 21 nt, RNAi-antisense strand
aagaggaagaggccguugcuu

SEQ ID NO: 20878 - DNA, 21 bp, Homo sapiens
caacggcctcttcctcttctc

SEQ ID NO: 20879 - RNA, 21 nt, RNAi-sense strand
acggccucuuccucuucucuu

SEQ ID NO: 20880 - RNA, 21 nt, RNAi-antisense strand
gagaagaggaagaggccguuu

SEQ ID NO: 20881 - DNA, 21 bp, Homo sapiens
cacgtcagcagtcggcactga

SEQ ID NO: 20882 - RNA, 21 nt, RNAi-sense strand
cgucagcagucggcacugauu

SEQ ID NO: 20883 - RNA, 21 nt, RNAi-antisense strand
ucagugccgacugcugacguu

SEQ ID NO: 20884 - DNA, 21 bp, Homo sapiens
cagagaccgagagcatgagtg

SEQ ID NO: 20885 - RNA, 21 nt, RNAi-sense strand
gagaccgagagcaugaguguu

SEQ ID NO: 20886 - RNA, 21 nt, RNAi-antisense strand
cacucaugcucucggucucuu

SEQ ID NO: 20887 - DNA, 21 bp, Homo sapiens
cagactctactatttccgtca

SEQ ID NO: 20888 - RNA, 21 nt, RNAi-sense strand
gacucuacuauuuccgucauu

SEQ ID NO: 20889 - RNA, 21 nt, RNAi-antisense strand
ugacggaaauaguagagucuu

SEQ ID NO: 20890 - DNA, 21 bp, Homo sapiens
caagtttctgtttgatttgga

SEQ ID NO: 20891 - RNA, 21 nt, RNAi-sense strand
aguuucuguuugauuuggauu

SEQ ID NO: 20892 - RNA, 21 nt, RNAi-antisense strand
uccaaaucaaacagaaacuuu

SEQ ID NO: 20893 - DNA, 21 bp, Homo sapiens
catctcaggatcggattctgt

SEQ ID NO: 20894 - RNA, 21 nt, RNAi-sense strand
ucucaggaucggauucuguuu

SEQ ID NO: 20895 - RNA, 21 nt, RNAi-antisense strand
acagaauccgauccugagauu

SEQ ID NO: 20896 - DNA, 21 bp, Homo sapiens
catcttctggtagccgtgcag

SEQ ID NO: 20897 - RNA, 21 nt, RNAi-sense strand
ucuucugguagccgugcaguu

SEQ ID NO: 20898 - RNA, 21 nt, RNAi-antisense strand
cugcacggcuaccagaagauu

SEQ ID NO: 20899 - DNA, 21 bp, Homo sapiens
cattacataggttacgtcagc

SEQ ID NO: 20900 - RNA, 21 nt, RNAi-sense strand
uuacauagguuacgucagcuu

SEQ ID NO: 20901 - RNA, 21 nt, RNAi-antisense strand
gcugacguaaccuauguaauu

SEQ ID NO: 20902 - DNA, 21 bp, Homo sapiens
cataggttacgtcagcctact

SEQ ID NO: 20903 - RNA, 21 nt, RNAi-sense strand
uagguuacgucagccuacuuu

SEQ ID NO: 20904 - RNA, 21 nt, RNAi-antisense strand
aguaggcugacguaaccuauu

SEQ ID NO: 20905 - DNA, 21 bp, Homo sapiens
cagcctactgtggctgttgag

SEQ ID NO: 20906 - RNA, 21 nt, RNAi-sense strand
gccuacuguggcuguugaguu

SEQ ID NO: 20907 - RNA, 21 nt, RNAi-antisense strand
cucaacagccacaguaggcuu

SEQ ID NO: 20908 - DNA, 21 bp, Homo sapiens
caaagcatttctcctttctgg

SEQ ID NO: 20909 - RNA, 21 nt, RNAi-sense strand
aagcauuucuccuuucugguu

SEQ ID NO: 20910 - RNA, 21 nt, RNAi-antisense strand
ccagaaaggagaaaugcuuuu

SEQ ID NO: 20911 - DNA, 21 bp, Homo sapiens
caaagtaggtcagtaggttgg

SEQ ID NO: 20912 - RNA, 21 nt, RNAi-sense strand
aaguaggucaguagguugguu

SEQ ID NO: 20913 - RNA, 21 nt, RNAi-antisense strand
ccaaccuacugaccuacuuuu

SEQ ID NO: 20914 - DNA, 21 bp, Homo sapiens
cagatgagtggctctgtcctg

SEQ ID NO: 20915 - RNA, 21 nt, RNAi-sense strand
gaugaguggcucuguccuguu

SEQ ID NO: 20916 - RNA, 21 nt, RNAi-antisense strand
caggacagagccacucaucuu

SEQ ID NO: 20917 - DNA, 21 bp, Homo sapiens
cattccagctttgcaggtgac

SEQ ID NO: 20918 - RNA, 21 nt, RNAi-sense strand
uuccagcuuugcaggugacuu

SEQ ID NO: 20919 - RNA, 21 nt, RNAi-antisense strand
gucaccugcaaagcuggaauu

SEQ ID NO: 20920 - DNA, 21 bp, Homo sapiens
cactccagaagaactgcggca

SEQ ID NO: 20921 - RNA, 21 nt, RNAi-sense strand
cuccagaagaacugcggcauu

SEQ ID NO: 20922 - RNA, 21 nt, RNAi-antisense strand
ugccgcaguucuucuggaguu

SEQ ID NO: 20923 - DNA, 21 bp, Homo sapiens
cagaagaactgcggcacgtgc

SEQ ID NO: 20924 - RNA, 21 nt, RNAi-sense strand
gaagaacugcggcacgugcuu

SEQ ID NO: 20925 - RNA, 21 nt, RNAi-antisense strand
gcacgugccgcaguucuucuu

SEQ ID NO: 20926 - DNA, 21 bp, Homo sapiens
cagcctagccacaggctttga

SEQ ID NO: 20927 - RNA, 21 nt, RNAi-sense strand
gccuagccacaggcuuugauu

SEQ ID NO: 20928 - RNA, 21 nt, RNAi-antisense strand
ucaaagccuguggcuaggcuu

SEQ ID NO: 20929 - DNA, 21 bp, Homo sapiens
cacaggctttgagcgcctgca

SEQ ID NO: 20930 - RNA, 21 nt, RNAi-sense strand
caggcuuugagcgccugcauu

SEQ ID NO: 20931 - RNA, 21 nt, RNAi-antisense strand
ugcaggcgcucaaagccuguu

SEQ ID NO: 20932 - DNA, 21 bp, Homo sapiens
caggctttgagcgcctgcatt

SEQ ID NO: 20933 - RNA, 21 nt, RNAi-sense strand
ggcuuugagcgccugcauuuu

SEQ ID NO: 20934 - RNA, 21 nt, RNAi-antisense strand
aaugcaggcgcucaaagccuu

SEQ ID NO: 20935 - DNA, 21 bp, Homo sapiens
cagagctcctctcatcaaagc

SEQ ID NO: 20936 - RNA, 21 nt, RNAi-sense strand
gagcuccucucaucaaagcuu

SEQ ID NO: 20937 - RNA, 21 nt, RNAi-antisense strand
gcuuugaugagaggagcucuu

SEQ ID NO: 20938 - DNA, 21 bp, Homo sapiens
catcaaagcctttacaaggta

SEQ ID NO: 20939 - RNA, 21 nt, RNAi-sense strand
ucaaagccuuuacaagguauu

SEQ ID NO: 20940 - RNA, 21 nt, RNAi-antisense strand
uaccuuguaaaggcuuugauu

SEQ ID NO: 20941 - DNA, 21 bp, Homo sapiens
caaagcctttacaaggtactg

SEQ ID NO: 20942 - RNA, 21 nt, RNAi-sense strand
aagccuuuacaagguacuguu

SEQ ID NO: 20943 - RNA, 21 nt, RNAi-antisense strand
caguaccuuguaaaggcuuuu

SEQ ID NO: 20944 - DNA, 21 bp, Homo sapiens
cagaggctttgccttgacaga

SEQ ID NO: 20945 - RNA, 21 nt, RNAi-sense strand
gaggcuuugccuugacagauu

SEQ ID NO: 20946 - RNA, 21 nt, RNAi-antisense strand
ucugucaaggcaaagccucuu

SEQ ID NO: 20947 - DNA, 21 bp, Homo sapiens
cacaggaagtcacagtggtgc

SEQ ID NO: 20948 - RNA, 21 nt, RNAi-sense strand
caggaagucacaguggugcuu

SEQ ID NO: 20949 - RNA, 21 nt, RNAi-antisense strand
gcaccacugugacuuccuguu

SEQ ID NO: 20950 - DNA, 21 bp, Homo sapiens
gagctgaaccggtctcttcct

SEQ ID NO: 20951 - RNA, 21 nt, RNAi-sense strand
gcugaaccggucucuuccuuu

SEQ ID NO: 20952 - RNA, 21 nt, RNAi-antisense strand
aggaagagaccgguucagcuu

SEQ ID NO: 20953 - DNA, 21 bp, Homo sapiens
gaaccggtctcttcctcggaa

SEQ ID NO: 20954 - RNA, 21 nt, RNAi-sense strand
accggucucuuccucggaauu

SEQ ID NO: 20955 - RNA, 21 nt, RNAi-antisense strand
uuccgaggaagagaccgguuu

SEQ ID NO: 20956 - DNA, 21 bp, Homo sapiens
gacctctggttctacttcaca

SEQ ID NO: 20957 - RNA, 21 nt, RNAi-sense strand
ccucugguucuacuucacauu

SEQ ID NO: 20958 - RNA, 21 nt, RNAi-antisense strand
ugugaaguagaaccagagguu

SEQ ID NO: 20959 - DNA, 21 bp, Homo sapiens
gagtggtttccactcaacaag

SEQ ID NO: 20960 - RNA, 21 nt, RNAi-sense strand
gugguuuccacucaacaaguu

SEQ ID NO: 20961 - RNA, 21 nt, RNAi-antisense strand
cuuguugaguggaaaccacuu

SEQ ID NO: 20962 - DNA, 21 bp, Homo sapiens
gactacttccacatggcctac

SEQ ID NO: 20963 - RNA, 21 nt, RNAi-sense strand
cuacuuccacauggccuacuu

SEQ ID NO: 20964 - RNA, 21 nt, RNAi-antisense strand
guaggccauguggaaguaguu

SEQ ID NO: 20965 - DNA, 21 bp, Homo sapiens
gagcatcatcatcttcatcat

SEQ ID NO: 20966 - RNA, 21 nt, RNAi-sense strand
gcaucaucaucuucaucauuu

SEQ ID NO: 20967 - RNA, 21 nt, RNAi-antisense strand
augaugaagaugaugaugcuu

SEQ ID NO: 20968 - DNA, 21 bp, Homo sapiens
gactctgtcaaccaccgcctg

SEQ ID NO: 20969 - RNA, 21 nt, RNAi-sense strand
cucugucaaccaccgccuguu

SEQ ID NO: 20970 - RNA, 21 nt, RNAi-antisense strand
caggcggugguugacagaguu

SEQ ID NO: 20971 - DNA, 21 bp, Homo sapiens
gaatctcaagccggagacgct

SEQ ID NO: 20972 - RNA, 21 nt, RNAi-sense strand
aucucaagccggagacgcuuu

SEQ ID NO: 20973 - RNA, 21 nt, RNAi-antisense strand
agcgucuccggcuugagauuu

SEQ ID NO: 20974 - DNA, 21 bp, Homo sapiens
gagacgctgatcgactccttt

SEQ ID NO: 20975 - RNA, 21 nt, RNAi-sense strand
gacgcugaucgacuccuuuuu

SEQ ID NO: 20976 - RNA, 21 nt, RNAi-antisense strand
aaaggagucgaucagcgucuu

SEQ ID NO: 20977 - DNA, 21 bp, Homo sapiens
gacgctgatcgactcctttga

SEQ ID NO: 20978 - RNA, 21 nt, RNAi-sense strand
cgcugaucgacuccuuugauu

SEQ ID NO: 20979 - RNA, 21 nt, RNAi-antisense strand
ucaaaggagucgaucagcguu

SEQ ID NO: 20980 - DNA, 21 bp, Homo sapiens
gatcgactcctttgagctgct

SEQ ID NO: 20981 - RNA, 21 nt, RNAi-sense strand
ucgacuccuuugagcugcuuu

SEQ ID NO: 20982 - RNA, 21 nt, RNAi-antisense strand
agcagcucaaaggagucgauu

SEQ ID NO: 20983 - DNA, 21 bp, Homo sapiens
gactcctttgagctgctctac

SEQ ID NO: 20984 - RNA, 21 nt, RNAi-sense strand
cuccuuugagcugcucuacuu

SEQ ID NO: 20985 - RNA, 21 nt, RNAi-antisense strand
guagagcagcucaaaggaguu

SEQ ID NO: 20986 - DNA, 21 bp, Homo sapiens
gagctgctctactattatgat

SEQ ID NO: 20987 - RNA, 21 nt, RNAi-sense strand
gcugcucuacuauuaugauuu

SEQ ID NO: 20988 - RNA, 21 nt, RNAi-antisense strand
aucauaauaguagagcagcuu

SEQ ID NO: 20989 - DNA, 21 bp, Homo sapiens
gatcttcatcctcttcatctt

SEQ ID NO: 20990 - RNA, 21 nt, RNAi-sense strand
ucuucauccucuucaucuuuu

SEQ ID NO: 20991 - RNA, 21 nt, RNAi-antisense strand
aagaugaagaggaugaagauu

SEQ ID NO: 20992 - DNA, 21 bp, Homo sapiens
gaagcgcaagcgcctcttcct

SEQ ID NO: 20993 - RNA, 21 nt, RNAi-sense strand
agcgcaagcgccucuuccuuu

SEQ ID NO: 20994 - RNA, 21 nt, RNAi-antisense strand
aggaagaggcgcuugcgcuuu

SEQ ID NO: 20995 - DNA, 21 bp, Homo sapiens
gacagcaacggcctcttcctc

SEQ ID NO: 20996 - RNA, 21 nt, RNAi-sense strand
cagcaacggccucuuccucuu

SEQ ID NO: 20997 - RNA, 21 nt, RNAi-antisense strand
gaggaagaggccguugcuguu

SEQ ID NO: 20998 - DNA, 21 bp, Homo sapiens
gattcgtgtgtgtgtgtgtgt

SEQ ID NO: 20999 - RNA, 21 nt, RNAi-sense strand
uucguguguguguguguguuu

SEQ ID NO: 21000 - RNA, 21 nt, RNAi-antisense strand
acacacacacacacacgaauu

SEQ ID NO: 21001 - DNA, 21 bp, Homo sapiens
gactctactatttccgtcaag

SEQ ID NO: 21002 - RNA, 21 nt, RNAi-sense strand
cucuacuauuuccgucaaguu

SEQ ID NO: 21003 - RNA, 21 nt, RNAi-antisense strand
cuugacggaaauaguagaguu

SEQ ID NO: 21004 - DNA, 21 bp, Homo sapiens
gatttggatcatctcaggatc

SEQ ID NO: 21005 - RNA, 21 nt, RNAi-sense strand
uuuggaucaucucaggaucuu

SEQ ID NO: 21006 - RNA, 21 nt, RNAi-antisense strand
gauccugagaugauccaaauu

SEQ ID NO: 21007 - DNA, 21 bp, Homo sapiens
gatcatctcaggatcggattc

SEQ ID NO: 21008 - RNA, 21 nt, RNAi-sense strand
ucaucucaggaucggauucuu

SEQ ID NO: 21009 - RNA, 21 nt, RNAi-antisense strand
gaauccgauccugagaugauu

SEQ ID NO: 21010 - DNA, 21 bp, Homo sapiens
gacatcttctggtagccgtgc

SEQ ID NO: 21011 - RNA, 21 nt, RNAi-sense strand
caucuucugguagccgugcuu

SEQ ID NO: 21012 - RNA, 21 nt, RNAi-antisense strand
gcacggcuaccagaagauguu

SEQ ID NO: 21013 - DNA, 21 bp, Homo sapiens
gagcaaagcatttctcctttc

SEQ ID NO: 21014 - RNA, 21 nt, RNAi-sense strand
gcaaagcauuucuccuuucuu

SEQ ID NO: 21015 - RNA, 21 nt, RNAi-antisense strand
gaaaggagaaaugcuuugcuu

SEQ ID NO: 21016 - DNA, 21 bp, Homo sapiens
gacagatgagtggctctgtcc

SEQ ID NO: 21017 - RNA, 21 nt, RNAi-sense strand
cagaugaguggcucuguccuu

SEQ ID NO: 21018 - RNA, 21 nt, RNAi-antisense strand
ggacagagccacucaucuguu

SEQ ID NO: 21019 - DNA, 21 bp, Homo sapiens
gatgagtggctctgtcctgtc

SEQ ID NO: 21020 - RNA, 21 nt, RNAi-sense strand
ugaguggcucuguccugucuu

SEQ ID NO: 21021 - RNA, 21 nt, RNAi-antisense strand
gacaggacagagccacucauu

SEQ ID NO: 21022 - DNA, 21 bp, Homo sapiens
gagtggctctgtcctgtcact

SEQ ID NO: 21023 - RNA, 21 nt, RNAi-sense strand
guggcucuguccugucacuuu

SEQ ID NO: 21024 - RNA, 21 nt, RNAi-antisense strand
agugacaggacagagccacuu

SEQ ID NO: 21025 - DNA, 21 bp, Homo sapiens
gaagaactgcggcacgtgctt

SEQ ID NO: 21026 - RNA, 21 nt, RNAi-sense strand
agaacugcggcacgugcuuuu

SEQ ID NO: 21027 - RNA, 21 nt, RNAi-antisense strand
aagcacgugccgcaguucuuu

SEQ ID NO: 21028 - DNA, 21 bp, Homo sapiens
gagctcctctcatcaaagcct

SEQ ID NO: 21029 - RNA, 21 nt, RNAi-sense strand
gcuccucucaucaaagccuuu

SEQ ID NO: 21030 - RNA, 21 nt, RNAi-antisense strand
aggcuuugaugagaggagcuu

SEQ ID NO: 21031 - DNA, 21 bp, Homo sapiens
gaggctttgccttgacagagt

SEQ ID NO: 21032 - RNA, 21 nt, RNAi-sense strand
ggcuuugccuugacagaguuu

SEQ ID NO: 21033 - RNA, 21 nt, RNAi-antisense strand
acucugucaaggcaaagccuu

SEQ ID NO: 21034 - DNA, 21 bp, Homo sapiens
gaatgaagtaaatacagtcac

SEQ ID NO: 21035 - RNA, 21 nt, RNAi-sense strand
augaaguaaauacagucacuu

SEQ ID NO: 21036 - RNA, 21 nt, RNAi-antisense strand
gugacuguauuuacuucauuu

SEQ ID NO: 21037 - DNA, 21 bp, Homo sapiens
gaagtaaatacagtcacagcc

SEQ ID NO: 21038 - RNA, 21 nt, RNAi-sense strand
aguaaauacagucacagccuu

SEQ ID NO: 21039 - RNA, 21 nt, RNAi-antisense strand
ggcugugacuguauuuacuuu

SEQ ID NO: 21040 - DNA, 21 bp, Homo sapiens
tacttcacactgcagaactgg

SEQ ID NO: 21041 - RNA, 21 nt, RNAi-sense strand
cuucacacugcagaacugguu

SEQ ID NO: 21042 - RNA, 21 nt, RNAi-antisense strand
ccaguucugcagugugaaguu

SEQ ID NO: 21043 - DNA, 21 bp, Homo sapiens
tacttccacatggcctacaac

SEQ ID NO: 21044 - RNA, 21 nt, RNAi-sense strand
cuuccacauggccuacaacuu

SEQ ID NO: 21045 - RNA, 21 nt, RNAi-antisense strand
guuguaggccauguggaaguu

SEQ ID NO: 21046 - DNA, 21 bp, Homo sapiens
tacgtgagcatcatcatcttc

SEQ ID NO: 21047 - RNA, 21 nt, RNAi-sense strand
cgugagcaucaucaucuucuu

SEQ ID NO: 21048 - RNA, 21 nt, RNAi-antisense strand
gaagaugaugaugcucacguu

SEQ ID NO: 21049 - DNA, 21 bp, Homo sapiens
taccagcaccacctgtctgtc

SEQ ID NO: 21050 - RNA, 21 nt, RNAi-sense strand
ccagcaccaccugucugucuu

SEQ ID NO: 21051 - RNA, 21 nt, RNAi-antisense strand
gacagacagguggugcugguu

SEQ ID NO: 21052 - DNA, 21 bp, Homo sapiens
tactattatgatgagtacctg

SEQ ID NO: 21053 - RNA, 21 nt, RNAi-sense strand
cuauuaugaugaguaccuguu

SEQ ID NO: 21054 - RNA, 21 nt, RNAi-antisense strand
cagguacucaucauaauaguu

SEQ ID NO: 21055 - DNA, 21 bp, Homo sapiens
tacttcagcggctgctttact

SEQ ID NO: 21056 - RNA, 21 nt, RNAi-sense strand
cuucagcggcugcuuuacuuu

SEQ ID NO: 21057 - RNA, 21 nt, RNAi-antisense strand
aguaaagcagccgcugaaguu

SEQ ID NO: 21058 - DNA, 21 bp, Homo sapiens
tactgcctctaaagctgagag

SEQ ID NO: 21059 - RNA, 21 nt, RNAi-sense strand
cugccucuaaagcugagaguu

SEQ ID NO: 21060 - RNA, 21 nt, RNAi-antisense strand
cucucagcuuuagaggcaguu

SEQ ID NO: 21061 - DNA, 21 bp, Homo sapiens
taaagctgagagcttgattcc

SEQ ID NO: 21062 - RNA, 21 nt, RNAi-sense strand
aagcugagagcuugauuccuu

SEQ ID NO: 21063 - RNA, 21 nt, RNAi-antisense strand
ggaaucaagcucucagcuuuu

SEQ ID NO: 21064 - DNA, 21 bp, Homo sapiens
tactactggtacctggtcacc

SEQ ID NO: 21065 - RNA, 21 nt, RNAi-sense strand
cuacugguaccuggucaccuu

SEQ ID NO: 21066 - RNA, 21 nt, RNAi-antisense strand
ggugaccagguaccaguaguu

SEQ ID NO: 21067 - DNA, 21 bp, Homo sapiens
tactggtacctggtcaccgag

SEQ ID NO: 21068 - RNA, 21 nt, RNAi-sense strand
cugguaccuggucaccgaguu

SEQ ID NO: 21069 - RNA, 21 nt, RNAi-antisense strand
cucggugaccagguaccaguu

SEQ ID NO: 21070 - DNA, 21 bp, Homo sapiens
taaccagagaccgagagcatg

SEQ ID NO: 21071 - RNA, 21 nt, RNAi-sense strand
accagagaccgagagcauguu

SEQ ID NO: 21072 - RNA, 21 nt, RNAi-antisense strand
caugcucucggucucugguuu

SEQ ID NO: 21073 - DNA, 21 bp, Homo sapiens
tatatgtgtgcgcagagtgca

SEQ ID NO: 21074 - RNA, 21 nt, RNAi-sense strand
uaugugugcgcagagugcauu

SEQ ID NO: 21075 - RNA, 21 nt, RNAi-antisense strand
ugcacucugcgcacacauauu

SEQ ID NO: 21076 - DNA, 21 bp, Homo sapiens
tatgtgtgcgcagagtgcatc

SEQ ID NO: 21077 - RNA, 21 nt, RNAi-sense strand
ugugugcgcagagugcaucuu

SEQ ID NO: 21078 - RNA, 21 nt, RNAi-antisense strand
gaugcacucugcgcacacauu

SEQ ID NO: 21079 - DNA, 21 bp, Homo sapiens
tactatttccgtcaagtttct

SEQ ID NO: 21080 - RNA, 21 nt, RNAi-sense strand
cuauuuccgucaaguuucuuu

SEQ ID NO: 21081 - RNA, 21 nt, RNAi-antisense strand
agaaacuugacggaaauaguu

SEQ ID NO: 21082 - DNA, 21 bp, Homo sapiens
tatttccgtcaagtttctgtt

SEQ ID NO: 21083 - RNA, 21 nt, RNAi-sense strand
uuuccgucaaguuucuguuuu

SEQ ID NO: 21084 - RNA, 21 nt, RNAi-antisense strand
aacagaaacuugacggaaauu

SEQ ID NO: 21085 - DNA, 21 bp, Homo sapiens
tacattacataggttacgtca

SEQ ID NO: 21086 - RNA, 21 nt, RNAi-sense strand
cauuacauagguuacgucauu

SEQ ID NO: 21087 - RNA, 21 nt, RNAi-antisense strand
ugacguaaccuauguaauguu

SEQ ID NO: 21088 - DNA, 21 bp, Homo sapiens
tacataggttacgtcagccta

SEQ ID NO: 21089 - RNA, 21 nt, RNAi-sense strand
cauagguuacgucagccuauu

SEQ ID NO: 21090 - RNA, 21 nt, RNAi-antisense strand
uaggcugacguaaccuauguu

SEQ ID NO: 21091 - DNA, 21 bp, Homo sapiens
taggttacgtcagcctactgt

SEQ ID NO: 21092 - RNA, 21 nt, RNAi-sense strand
gguuacgucagccuacuguuu

SEQ ID NO: 21093 - RNA, 21 nt, RNAi-antisense strand
acaguaggcugacguaaccuu

SEQ ID NO: 21094 - DNA, 21 bp, Homo sapiens
tacgtcagcctactgtggctg

SEQ ID NO: 21095 - RNA, 21 nt, RNAi-sense strand
cgucagccuacuguggcuguu

SEQ ID NO: 21096 - RNA, 21 nt, RNAi-antisense strand
cagccacaguaggcugacguu

SEQ ID NO: 21097 - DNA, 21 bp, Homo sapiens
tactgtggctgttgagcaaag

SEQ ID NO: 21098 - RNA, 21 nt, RNAi-sense strand
cuguggcuguugagcaaaguu

SEQ ID NO: 21099 - RNA, 21 nt, RNAi-antisense strand
cuuugcucaacagccacaguu

SEQ ID NO: 21100 - DNA, 21 bp, Homo sapiens
tagccacaggctttgagcgcc

SEQ ID NO: 21101 - RNA, 21 nt, RNAi-sense strand
gccacaggcuuugagcgccuu

SEQ ID NO: 21102 - RNA, 21 nt, RNAi-antisense strand
ggcgcucaaagccuguggcuu

SEQ ID NO: 21103 - DNA, 21 bp, Homo sapiens
aagctgagagcttgattccag

SEQ ID NO: 21104 - RNA, 21 nt, RNAi-sense strand
gcugagagcuugauuccaguu

SEQ ID NO: 21105 - RNA, 21 nt, RNAi-antisense strand
cuggaaucaagcucucagcuu

SEQ ID NO: 21106 - DNA, 21 bp, Homo sapiens
cacatggcctacaacgtcatc

SEQ ID NO: 21107 - RNA, 21 nt, RNAi-sense strand
cauggccuacaacgucaucuu

SEQ ID NO: 21108 - RNA, 21 nt, RNAi-antisense strand
gaugacguuguaggccauguu

SEQ ID NO: 21109 - DNA, 21 bp, Homo sapiens
catggcctacaacgtcatcac

SEQ ID NO: 21110 - RNA, 21 nt, RNAi-sense strand
uggccuacaacgucaucacuu

SEQ ID NO: 21111 - RNA, 21 nt, RNAi-antisense strand
gugaugacguuguaggccauu

SEQ ID NO: 21112 - DNA, 21 bp, Homo sapiens
cacgtacgtgagcatcatcat

SEQ ID NO: 21113 - RNA, 21 nt, RNAi-sense strand
cguacgugagcaucaucauuu

SEQ ID NO: 21114 - RNA, 21 nt, RNAi-antisense strand
augaugaugcucacguacguu

SEQ ID NO: 21115 - DNA, 21 bp, Homo sapiens
caagaatctcaagccggagac

SEQ ID NO: 21116 - RNA, 21 nt, RNAi-sense strand
agaaucucaagccggagacuu

SEQ ID NO: 21117 - RNA, 21 nt, RNAi-antisense strand
gucuccggcuugagauucuuu

SEQ ID NO: 21118 - DNA, 21 bp, Homo sapiens
catgtacttcagcggctgctt

SEQ ID NO: 21119 - RNA, 21 nt, RNAi-sense strand
uguacuucagcggcugcuuuu

SEQ ID NO: 21120 - RNA, 21 nt, RNAi-antisense strand
aagcagccgcugaaguacauu

SEQ ID NO: 21121 - DNA, 21 bp, Homo sapiens
catcttcaccttcttcgccat

SEQ ID NO: 21122 - RNA, 21 nt, RNAi-sense strand
ucuucaccuucuucgccauuu

SEQ ID NO: 21123 - RNA, 21 nt, RNAi-antisense strand
auggcgaagaaggugaagauu

SEQ ID NO: 21124 - DNA, 21 bp, Homo sapiens
gagacgctgatcgactccttt

SEQ ID NO: 21125 - RNA, 21 nt, RNAi-sense strand
gacgcugaucgacuccuuuuu

SEQ ID NO: 21126 - RNA, 21 nt, RNAi-antisense strand
aaaggagucgaucagcgucuu

SEQ ID NO: 21127 - DNA, 21 bp, Homo sapiens
gacgctgatcgactcctttga

SEQ ID NO: 21128 - RNA, 21 nt, RNAi-sense strand
cgcugaucgacuccuuugauu

SEQ ID NO: 21129 - RNA, 21 nt, RNAi-antisense strand
ucaaaggagucgaucagcguu

SEQ ID NO: 21130 - DNA, 21 bp, Homo sapiens
gagctgctctactattatgat

SEQ ID NO: 21131 - RNA, 21 nt, RNAi-sense strand
gcugcucuacuauuaugauuu

SEQ ID NO: 21132 - RNA, 21 nt, RNAi-antisense strand
aucauaauaguagagcagcuu

SEQ ID NO: 21133 - DNA, 21 bp, Homo sapiens
tactattatgatgagtacctg

SEQ ID NO: 21134 - RNA, 21 nt, RNAi-sense strand
cuauuaugaugaguaccuguu

SEQ ID NO: 21135 - RNA, 21 nt, RNAi-antisense strand
cagguacucaucauaauaguu
